(19) United States
(12) Patent Application Publication
(10) Pub. No.: US 2026/0207781 A1
(43) Pub. Date: Jul. 23, 2026

(54) METHODS AND COMPOSITIONS FOR ALTERING GENE EXPRESSION

(71) Applicant: Emugen Therapeutics LLC, Woburn, MA (US)

(72) Inventors: Jonathan J. Wilde, Waltham, MA (US); Tobias Kaiser, Boston, MA (US); Xian Gao, Belmont, MA (US); Olga Brevnova, Somerville, MA (US); Tomomi Aida, Arlington, MA (US); Yuanyuan Hou, Cambridge, MA (US); Tyler Brown, Somerville, MA (US)

(21) Appl. No.: 19/636,471

(22) Filed: Apr. 1, 2026

Related U.S. Application Data
(63) Continuation of application No. PCT/US24/50688, filed on Oct. 10, 2024.
(60) Provisional application No. 63/589,516, filed on Oct. 11, 2023.

(51) Int. Cl. A61K 48/00; A61K 31/7105; A61K 38/17; A61P 25/28; C12N 15/113; C12N 15/86

(52) U.S. Cl. CPC A61K 48/005; A61K 31/7105; A61K 38/1709; A61P 25/28; C12N 15/113; C12N 15/86; C12N 2310/11; C12N 2310/14; C12N 2320/33; C12N 2750/14143; C12N 2830/40

(57) ABSTRACT

Provided herein, inter alia, are expression systems capable of modulating expression of a target gene. In embodiments, the expression systems silence the expression of an endogenous version of the gene and induce expression of a recombinant version of the gene. The expression system provided herein is contemplated to be effective for treating genetic disorders.

### CROSS-REFERENCE

[0001] This application is a continuation application of International Patent Application No. PCT/US2024/050688 filed Oct. 10, 2024, which claims the benefit of U.S. Provisional Application No. 63/589,516, filed Oct. 11, 2023, which applications are incorporated herein by reference.

### INCORPORATION BY REFERENCE OF SEQUENCE LISTING

[0002] The present application is being filed along with a Sequence Listing in electronic format. The Sequence Listing is provided as a file entitled 062692-507001WO.xml, created Oct. 9, 2024, which is 1,436,838 bytes in size. The information in the electronic format of the Sequence Listing is incorporated by reference in its entirety.

### BACKGROUND

[0003] Some disorders, such as X-linked disorders, may be caused by haploinsufficiency of a gene. In some cases, a tissue exhibits mosaic expression of the gene. The mosaic expression may be due to random X-inactivation, which may lead to approximately 50% of cells of the tissue expressing the gene at normal levels, and the other 50% of cells of the tissue completely lacking expression of the gene. This may pose a problem for gene therapies using gene replacement, especially where overexpression of the gene is toxic and some cells already maintain normal expression of the gene. As such, it may be useful to not only restore expression of the gene in cells lacking the gene's expression, but also avoid overexpression in all cells, especially those that express wild-type levels of the gene. Provided herein, inter alia, are solutions to these and other problems in the art.

### SUMMARY

[0004] Disclosed herein, in some embodiments, are systems for altering expression of a target. Some embodiments include a silencing module and an expression module.

[0005] Disclosed herein, in some embodiments, are expression systems for altering gene expression, comprising: a silencing module deoxyribonucleic acid (DNA) sequence comprising: a first promoter sequence, an optional exonic splicing silencer (ESS) nucleic acid sequence, a antisense nucleic acid sequence that targets a target ribonucleic acid (RNA), an Sm binding site sequence, a 3′ hairpin sequence, and a 3′ terminator sequence, wherein the silencing module encodes a modified U7 small nuclear RNA (snRNA) that silences or reduces endogenous target protein expression; and a target synthesis module DNA sequence comprising: a second promoter sequence, a 5′ untranslated region (UTR) sequence, a nucleic acid coding sequence (CDS) encoding the target, and a 3′ UTR sequence, wherein the target synthesis module encodes a recombinant messenger RNA (mRNA) that generates target protein.

[0006] In some embodiments, the DNA molecule of the silencing module comprises an arrayed series of silencing modules. In some embodiments, the first promoter comprises a mouse U1 snRNA (“MmU1”) promoter, a mouse U2 snRNA (“MmU2”) promoter, a mouse U3 snRNA (“MmU3”) promoter, a mouse U4 snRNA (“MmU4”) promoter, a mouse U5 snRNA (“MmU5”) promoter, a mouse U6 snRNA (“MmU6”) promoter, a mouse U7 snRNA (“MmU7”) promoter, a mouse U11 snRNA (“MmU11”) promoter, a mouse U12 snRNA (“MmU12”) promoter, a mouse U7SK snRNA (“MmU7SK”) promoter, a human U1 snRNA (“HsU1”) promoter, a human U2 snRNA (“HsU2”) promoter, a human U3 snRNA (“HsU3”) promoter, a human U4 snRNA (“HsU4”) promoter, a human U5 snRNA (“HsU5”) promoter, a human U6 snRNA (“HsU6”) promoter, a human U7 snRNA (“HsU7”) promoter, a human U11 snRNA (“HsU11”) promoter, a human U12 snRNA (“HsU12”) promoter, a human U7SK snRNA (“HsU7SK”) promoter, or a functional combination of fragments thereof. In some embodiments, the silencing module comprises the ESS. In some embodiments, the ESS recruits a protein factor or group of factors that reduce or silence splicing of the endogenous target RNA. In some embodiments, the antisense nucleic acid sequence is fully reverse complementary or partially reverse complementary to the targeted region. In some embodiments, the antisense nucleic acid sequence is at least 80%, at least 85%, at least 90%, at least 95%, at least 98%, at least 99%, or at least 100% reverse complementary to the targeted region. In some embodiments, the targeted region is within an intron of the endogenous target RNA. In some embodiments, the targeted region is within an exon of the endogenous target RNA. In some embodiments, the antisense nucleic acid sequence targets an alternatively spliced exon of the endogenous target RNA. In some embodiments, the targeted region is within 100 nucleotides of an intron/exon junction. In some embodiments, the antisense nucleic acid sequence is 10-60 nucleotides in length. In some embodiments, the silencing module further comprises an Sm binding site sequence. In some embodiments, the hairpin sequence comprises a U7 small nuclear RNA (snRNA) 3′ hairpin sequence. In some embodiments, the 3′ terminator sequence comprises a mouse U1 snRNA (“MmU1”) 3′ terminator sequence, a mouse U2 snRNA (“MmU2”) 3′ terminator sequence, a mouse U3 snRNA (“MmU3”) 3′ terminator sequence, a mouse U4 snRNA (“MmU4”) 3′ terminator sequence, a mouse U5 snRNA (“MmU5”) 3′ terminator sequence, a mouse U6 snRNA (“MmU6”) 3′ terminator sequence, a mouse U7 snRNA (“MmU7”) 3′ terminator sequence, a mouse U11 snRNA (“MmU11”) 3′ terminator sequence, a mouse U12 snRNA (“MmU12”) 3′ terminator sequence, a mouse U7SK snRNA (“MmU7SK”) 3′ terminator sequence, a human U1 snRNA (“HsU1”) 3′ terminator sequence, a human U2 snRNA (“HsU2”) 3′ terminator sequence, a human U3 snRNA (“HsU3”) 3′ terminator sequence, a human U4 snRNA (“HsU4”) 3′ terminator sequence, a human U5 snRNA (“HsU5”) 3′ terminator sequence, a human U6 snRNA (“HsU6”) 3′ terminator sequence, a human U7 snRNA (“HsU7”) 3′ terminator sequence, a human U11 snRNA (“HsU11”) 3′ terminator sequence, a human U12 snRNA (“HsU12”) 3′ terminator sequence, a human U7SK snRNA (“HsU7SK”) 3′ terminator sequence, or a functional combination of fragments thereof. In some embodiments, the second promoter sequence comprises a weak promoter that drives expression of mRNA molecules at a rate no greater than an endogenous target promoter. In some embodiments, the second promoter sequence comprises a promoter sequence of a -Ubc promoter, a PGK promoter, or an EF1a-core promoter. In some embodiments, the synthesis module further comprises an SV40 intron sequence. In some embodiments, the synthesis module further comprises a 5′ untranslated region (UTR) sequence of the target RNA. In some embodiments, the synthesis module further comprises a Kozak sequence. In some embodiments, the CDS comprises an intron. In some embodiments, the CDS does not comprise an intron. In some embodiments, the synthesis module comprises a polyA signal sequence. In some embodiments, the polyA signal sequence comprises a -bGH signal sequence, a SV40 signal sequence, or a hGH polyA signal sequence. In some embodiments, the silencing module reduces a target (e.g. protein or RNA, such as a MECP2 protein or RNA) measurement in a cell or population of cells by at least 5%, at least 10%, at least 15%, at least 20%, at least 25%, at least 30%, at least 35%, at least 40%, at least 45%, at least 50%, at least 55%, at least 60%, at least 65%, at least 70%, at least 75%, or at least 80%, relative to a baseline target measurement. In some embodiments, the synthesis module increases a target measurement (e.g. protein or RNA, such as a MECP2 protein or RNA) in a cell or population of cells by at least 5%, at least 10%, at least 15%, at least 20%, at least 25%, at least 30%, at least 35%, at least 40%, at least 45%, at least 50%, at least 55%, at least 60%, at least 65%, at least 70%, at least 75%, at least 80%, at least 90%, at least 100%, at least 110%, at least 120%, at least 130%, at least 140%, at least 150%, at least 160%, at least 170%, at least 180%, at least 190%, at least 200%, at least 210%, at least 220%, at least 230%, at least 240%, or at least 250%, relative to a baseline target measurement. In some embodiments, contact or expression of the system with a cell or cell population results in a target (e.g. protein or RNA, such as a MECP2 protein or RNA) measurement between 1× and 2× relative to a control.

[0007] Disclosed herein, in some embodiments, are dual RNA systems for altering gene expression, comprising: a U7 small nuclear RNA (snRNA) silencing module comprising: an exonic splicing silencer (ESS) nucleic acid sequence, a antisense nucleic acid sequence that binds a target ribonucleic acid (RNA), an Sm binding site sequence, and a 3′ hairpin sequence; and a target messenger RNA (mRNA) synthesis module comprising: a 5′ untranslated region (UTR) sequence, a nucleic acid coding sequence (CDS) encoding the target, and a 3′ UTR sequence; wherein the U7 snRNA silencing module silences or reduces endogenous target protein expression, and the target mRNA synthesis module generates target protein.

[0008] Disclosed herein, in some embodiments, are systems for altering gene expression, comprising: a silencing module comprising an exonic splicing silencer (ESS) nucleic acid sequence coupled with a antisense nucleic acid sequence that targets an endogenous target ribonucleic acid (RNA); and a synthesis module comprising a nucleic acid coding sequence (CDS) that encodes a recombinant version of the target RNA.

[0009] Disclosed herein, in some embodiments, are pharmaceutical compositions comprising a system herein, and a pharmaceutically acceptable carrier. Disclosed herein, in some embodiments, are methods comprising administering the pharmaceutical composition to a subject. In some embodiments, the subject has been identified as having a genetic disease prior to the treatment. In some embodiments, the genetic disease is associated with haploinsufficiency of the endogenous target RNA. In some embodiments, the genetic disease is associated with tissue mosaic expression of the endogenous target RNA. In some embodiments, the genetic disease comprises Rett syndrome.

[0010] Disclosed herein, in some embodiments, are methods, comprising: suppressing protein expression of an endogenous target RNA in a first cell expressing the endogenous target RNA; and synthesizing or enhancing protein expression of a recombinant version of the target RNA in a second cell that otherwise does not express the endogenous target RNA, or that expresses the endogenous target RNA at a low level. Some embodiments include synthesizing or enhancing protein expression of the recombinant version of the target RNA in the first cell.

[0011] In some embodiments, suppressing is performed upon contacting the first cell with a silencing module or with a vector encoding the silencing module. In some embodiments, suppressing protein expression comprises suppressing endogenous target protein expression by at least 10%. In some embodiments, said synthesizing or enhancing recombinant target protein expression is performed upon contacting the second cell with a synthesis module or with a vector encoding the synthesis module. In some embodiments, enhancing recombinant target protein expression comprises enhancing protein expression by at least 10%. In some embodiments, the low level of expression of the endogenous target RNA in the second cell comprises an undetectable level, comprises a level below a desired level, comprises a level lower than a wild type cell, or comprises an expression lower than that of the first cell. In some embodiments, the low level of expression of the endogenous target RNA in the second cell comprises a level at least 10% lower than that of the first cell. In some embodiments, the silencing module and the synthesis module are encoded together in a nucleic acid construct. In some embodiments, the nucleic acid construct is delivered to the first and second cell using one or more viral vectors. In some embodiments, the silencing module and the synthesis module are encoded in separate nucleic acid constructs. In some embodiments, the nucleic acid construct or the separate nucleic acid constructs are delivered to the cells using one or more viral vectors.

### BRIEF DESCRIPTION OF THE DRAWINGS

[0012] FIG. 1A is a schematic of a nucleic acid vector encoding RNAs for simultaneous depletion of an endogenous target, and expression of the target.

[0013] FIG. 1B is a schematic of a nucleic acid vector encoding RNAs for simultaneous depletion of an endogenous target comprising methyl CpG binding protein 2 (MECP2 or Mecp2), and expression of a regulated target transgene comprising an MECP2 transgene.

[0014] FIG. 2 is a schematic of an engineered 3′ UTR including of an array of fragments from an endogenous human 3′ UTR, here an MECP2 3′ UTR.

[0015] FIG. 3 is a plot showing experimental results where candidate U7 constructs were screened in quadruplicate and sorted by their combined rank within each experiment and their overall reduction of levels of a target, Mecp2.

[0016] FIG. 4 is a plot showing experimental results where U7 candidates 1 and 2 were transfected into Neuro-2a cells and their ability to reduce levels of an example target (here, Mecp2) was confirmed by qRT-PCR.

[0017] FIG. 5 is a plot showing experimental results where co-expression of U7 candidate 1 or 2 with an Mecp2 transgene containing fragments of intron 1 and 3 of Mecp2 reduces total Mecp 2 expression in Neuro-2a cells.

[0018] FIG. 6 is a plot showing dose-dependent reduction of Mecp2 RNA levels in mouse primary cortical neurons cultured with different amounts of AAV expressing U7 candidate 1.

[0019] FIG. 7 is a plot showing that delivery of AAV expressing either U7 candidate 1 or 2 to adult C57Bl/6J mice reduced the level of MECP2 protein across transduced cells. The plot includes groups of 3 bar graphs. In each group, the left bar corresponds to U7-Scram, the middle bar corresponds to U7-01, and the right bar corresponds to U7-02.

[0020] FIG. 8 includes images of immunohistochemistry for MECP2, showing reduced MECP2 protein levels in animals injected with AAVs expressing Ubc-Mecp2 along with either U7 Candidate 1 or 2 compared to animals expressing only Ubc-Mecp2.

[0021] FIG. 9 is a plot including immunohistochemistry results for MECP2 showing reduced MECP2 protein levels in animals injected with AAVs expressing Ubc-Mecp2 along with either U7 Candidate 1 or 2 compared to animals expressing only Ubc-Mecp2

[0022] FIG. 10 is a plot of results where total MECP2 protein levels across thalamic cells were normalized in wildtype female mice injected with Ubc-Mecp2-U7-01 or Ubc-Mecp2-U7-02 compared to animals expressing Ubc-Mecp2 with a scrambled U7 cassette.

[0023] FIG. 11 is a violin plot of MECP2 protein expression levels across thalamic cells in female heterozygous Mecp2 mutant mice, showing normalization of MECP2 protein expression patterns in animals injected with Ubc-Mecp2-U7-01 or Ubc-Mecp2-U7-02 compared to animals expressing Ubc-Mecp2 with a scrambled U7 cassette.

[0024] FIG. 12 is a violin plot showing the per-cell levels of MECP2 protein in the cortex of wild-type mice injected systemically at P28 with the stated doses of either unregulated vector or Candidate 2.

[0025] FIG. 13 is a violin plot showing the per-cell levels of MECP2 protein in the thalamus of wild-type mice injected systemically at P28 with the stated doses of either unregulated vector or Candidate 2.

[0026] FIG. 14 is a log-transformed violin plot showing the per-cell levels of MECP2 protein in the thalamus of wild-type and Mecp2^{+/-} mice injected systemically at P28 with the stated dose of either unregulated vector or Candidate 2.

[0027] FIG. 15 is a Kaplan-Meier plot showing the survival curves of saline or Candidate-02-injected male mice of the noted genotypes and doses. Animals were injected systemically at P28.

[0028] FIG. 16 is a plot showing weekly phenotypic “Bird” scores, a commonly used scoring system to assess phenotypic progression in mouse models of Rett Syndrome. Mice of the stated genotypes were given IV injection of saline or virus at the described doses at P28.

[0029] FIG. 17 is a Kaplan-Meier plot showing the survival curves of saline or Candidate-02-injected male mice of the noted genotypes and doses. Animals were injected systemically at P14.

[0030] FIG. 18 is a plot showing weekly phenotypic “Bird” scores, a commonly used scoring system to assess phenotypic progression in mouse models of Rett Syndrome. Mice of the stated genotypes were given IV injection of saline or virus at the described doses at P14.

[0031] FIG. 19 is a plot showing the weekly body weights of wild-type and heterozygous Mecp2 mutant female mice injected with saline or the described doses of AAV at P28.

[0032] FIG. 20 is quantification of total MECP2 protein levels in differentiated ReNcell CX cultures with two candidate U7 constructs. Cells were transduced with 1e10vg AAV, which gives ~70% transduction efficiency, or treated with formulation buffer for 1-week before analysis.

[0033] FIG. 21 is a schematic of the fully humanized therapeutic vector.

[0034] FIG. 22 is quantification of total MECP2 protein levels in differentiated ReNcell CX cultures treated with formulation buffer, the mouse therapeutic vector used in mouse studies, or one of two different humanized therapeutic candidate vectors corresponding to the U7 sequences used in FIG. 21. Cells were transduced with the stated doses of AAV or treated with formulation buffer for 1-week before analysis.

[0035] FIG. 23 includes a schematic of a luciferase reporter containing a ubiquitous promoter (Ubc-SV40 pA), a canonical Kozak sequence, a fragment of mouse Scn2a exon 13, a fragment of mouse Scn2a intron 13, mouse Scn2a exon 13N, another fragment of mouse Scn2a intron 13, and a fragment of mouse Scn2a exon 14 fused in-frame to firefly luciferase.

[0036] FIG. 24 (top) includes results of end-point RT-PCR for NMD (upper band) and productive (lower band) and (bottom) an analysis of relative NMD and productive isoform transcript levels of Scn2a exon 13 in mouse Neuro-2a cells expressing a candidate ESS and U7 antisense sequence when driven by the combination of the mulal promoter and HUI terminator.

[0037] FIG. 25 shows relative NaV1.2 levels in differentiated ReNcell CX cultures transduced with scramble or three different U7 targeting sequences identified with this system. NaV1.2 levels in the plot within the figure were normalized to Actinin protein levels in each sample.

### DETAILED DESCRIPTION

[0038] An approach was developed that is useful for avoiding toxic overexpression of a target gene such as MECP2 by depleting endogenous gene product in cells expressing from a wildtype X chromosome, while simultaneously expressing a wildtype version of the gene under the control of a constitutively expressed promoter and endogenous regulatory elements. The approach may include a gene therapy approach useful for treating a genetic disorder such as Rett Syndrome without toxic transgene overexpression including multiple functional units. The approach may include a silencing module and a synthesis module. The silencing module may make use of a modified U7 small nuclear RNA (snRNA) that silences or reduces endogenous expression of a target. The synthesis module may use a recombinant target gene or target mRNA to produce the target.

[0039] Disclosed herein, in some embodiments, are systems for altering expression of a target. The system may include a dual system for reducing endogenous target expression, while expressing a recombinant version of the target. This may be done in in separate cells, or both in the same cell, depending for example on the level of endogenous target expression in the cell. Some embodiments include an RNA such as a modified U7 small nuclear RNA (snRNA) that reduces endogenous target expression. Some embodiments include an RNA that encodes the recombinant target. Some embodiments include an expression construct encoding the RNAs. Also included are methods of using the system to modify expression of the target. The method may be used to treat a disorder associated wth expression of the target.

[0040] Some embodiments relate to a system for altering gene expression. The system may include a silencing module. The silencing module may include an exonic splicing silencer (ESS) nucleic acid sequence. The ESS may be coupled with a antisense nucleic acid sequence targeting an endogenous target ribonucleic acid (RNA). The system may include a synthesis module. The synthesis module may include a nucleic acid coding sequence (CDS). The CDS may encode a recombinant version of the target RNA. Some embodiments relate to a system for altering gene expression, comprising: a silencing module comprising an exonic splicing silencer (ESS) nucleic acid sequence coupled with a antisense nucleic acid sequence targeting an endogenous target ribonucleic acid (RNA); and a synthesis module comprising a nucleic acid coding sequence (CDS) that encodes a recombinant version of the target RNA. An example of a target RNA may include an RNA encoding a target such as MECP2. For the system provided herein, in embodiments, the components are combined together within a single nucleic acid. For example, the components may be in a single viral vector or plasmid. In embodiments, the components are in separate nucleic acids. In embodiments, some components are separated among multiple nucleic acids. In embodiments, the synthesis module and the silencing module are included in separate nucleic acids. For example, the synthesis module may be in a first expression cassette and the silencing module may be in a second expression cassette. The system may include an expression construct. The system may include RNAs such as a U7 sRNA and an mRNA. The RNAs may be encoded by an expression construct. The system may be included in a method such as a method of treatment. An example of a disease that may be treated may include Dravet syndrome. Other examples may include other haploinsufficient diseases or disorders characterized by mosaic expression of a target gene. X-linked disorders or duplication syndromes may also be treated using the methods and compositions described herein. An example of a duplication syndrome may include Mecp2 duplication syndrome. A target gene may include a target RNA or target protein encoded by the target gene.

[0041] This disclosure includes a therapy in which expression of a target gene is both knocked down and increased within a cell. Due to random X-inactivation, cells in a disorder of patients may have either some target gene expression or none. AAV may be delivered to multiple cells and in the cells that express an endogenous transcript of the target gene the target gene is suppressed and then replaced by expression from the AAV. In some embodiments, in cells that lack expression of the target gene no knockdown of the endogenous target gene occurs but expression of the target gene from the AAV occurs.

[0042] Described herein are compositions and methods for treating a neurodevelopmental disorder in a subject in need thereof. The compositions and methods described herein address an unmet need for safe and effective treatment of neurodevelopmental disorders. The neurodevelopmental disorder may be genetically caused, such as by a mutation in a gene encoding a target (e.g. MECP2, e.g. resulting in MECP 2 haploinsufficiency). Described herein are compositions and methods for treating disorders such as Rett syndrome or MECP2 duplication syndrome in a subject in need thereof. The compositions and methods described herein address an unmet need for safe and effective treatment of disorders such as Rett syndrome and MECP2 duplication syndrome.

[0043] The compositions and methods provided herein may improve upon previous methods and systems. Some previous systems are described at Sinnett et al, Brain, 2021 Nov. 29;144 (10): 3005-3019; Gadalla et al, Mol Therapy, 2017 Apr. 22:5:180-190; Sinnett et al, Mol Therapy, 2017 Apr. 19:5:106-115; and Luoni et al, eLife, 2020 Mar. 24:9:e52629, which references are incorporated by reference in their entirety.

[0044] In some embodiments, contact or expression of the system with a cell or cell population results in a target (e.g. protein or RNA, such as a MECP2 protein or RNA) measurement of at least 0.5×, at least 0.6×, at least 0.7×, at least 0.8×, at least 0.9×, at least 1×, at least 1.1×, at least 1.2×, at least 1.3×, at least 1.4×, at least 1.5×, at least 1.6×, at least 1.7×, at least 1.8×, at least 1.9×, at least 2×, at least 2.1×, at least 2.2×, at least 2.3×, at least 2.4×, or at least 2.5×, relative to a control. In some embodiments, contact or expression of the system with a cell or cell population results in a target (e.g. protein or RNA, such as a MECP2 protein or RNA) measurement of less than 0.5×, less than 0.6×, less than 0.7×, less than 0.8×, less than 0.9×, less than 1×, less than 1.1×, less than 1.2×, less than 1.3×, less than 1.4×, less than 1.5×, less than 1.6×, less than 1.7×, less than 1.8×, less than 1.9×, less than 2×, less than 2.1×, less than 2.2×, less than 2.3×, less than 2.4×, or less than 2.5×, relative to a control. In some embodiments, contact or expression of the system with a cell or cell population results in a target (e.g. protein or RNA, such as a MECP2 protein or RNA) measurement between 0.5× and 2.5× relative to a control. In some embodiments, contact or expression of the system with a cell or cell population results in a target (e.g. protein or RNA, such as a MECP2 protein or RNA) measurement between 1× and 2× relative to a control. The control may be or include a cell or cell population not contacted with the system. The control may be or include a cell or cell population that does not express the system.

### Expression Systems

[0045] Provided herein, inter alia, are expression systems. The expression system may be capable of silencing expression of an endogenous gene (e.g. a gene affected by a genetic disorder), and synthesizing or enhancing expression of a recombinant version of the gene. For example, in embodiments, the expression system provided herein silences expression of an endogenous version of a target protein encoded by the endogenous gene (e.g. endogenous target RNA), and simultaneously generates a recombinant version of the target protein encoded by a recombinant version of the gene (e.g. nucleic acid coding sequence encoding the target protein, recombinant mRNA). The expression systems provided herein including embodiments thereof include a modified U7 small nuclear RNA (snRNA) capable of specifically targeting an endogenous mRNA or portion thereof to up-regulate or down-regulate splicing of exons in the endogenous mRNA (e.g. pre-mRNA), thereby inhibiting or downregulating expression of the endogenous gene (e.g. a gene affected by a genetic disorder). For example, the expression system may include an exonic splicing silencer (ESS) sequence capable of downregulating or inhibiting splicing or inducing exon skipping, and a antisense nucleic acid sequence targeting an endogenous target ribonucleic acid (RNA), thereby silencing expression of an endogenous protein encoded by the RNA. Thus, in embodiments, the expression system downregulates or inhibits expression of the endogenous version of a target protein. The expression systems provided herein including embodiments thereof further include a synthesis module DNA sequence allowing expression of a recombinant version of the target gene. In embodiments, the expression system therefore induces or generates production of a recombinant version of a target protein. For example, the synthesis module DNA sequence may include a nucleic acid coding sequence that encodes a recombinant version of a target protein having at least 80% identity to an endogenous version of the target protein. The expression system may be or include a DNA construct that encodes one or more RNAs.

[0046] In embodiments, silencing expression of a gene refers to inhibiting or downregulating expression levels of the gene. For example, silencing expression of a gene includes inhibiting or downregulating pre-mRNA processing. In another example, silencing expression of a gene includes downregulating or inhibiting production of a protein encoded by the gene. In embodiments, the expression system decreases expression of an endogenous gene at least 10%, 20%, 30%, 40%, 50%, 60%, 70%, 80%, 85%, 90%, 91%, 92% 93%, 94%, 95%, 96%, 97%, 98%, 99% or 100% relative to expression of the endogenous gene in the absence of the expression system. For example, the expression system may decrease the level of an endogenous target protein at least 10%, 20%, 30%, 40%, 50%, 60%, 70%, 80%, 85%, 90%, 91%, 92% 93%, 94%, 95%, 96%, 97%, 98%, 99% or 100% relative to the level of the endogenous target protein in the absence of the expression system.

[0047] Some embodiments include synthesizing a target protein (e.g. from an mRNA encoding the target protein). The mRNA encoding the target protein may be encoded by a synthetic construct. In embodiments, synthesizing a recombinant version of a gene or a recombinant mRNA includes expressing the gene (e.g. a gene affected by a genetic disorder) from a nucleic acid exogenous to the cell. In embodiments, the expression system provided herein produces a recombinant version of a target protein (e.g. a protein produced from the recombinant mRNA, or a protein encoded by the recombinant mRNA), wherein the level of the recombinant version of the target protein is at least 10% of the level of the endogenous version of the protein in a healthy cell (e.g. in a cell that does not have a genetic disorder Rett syndrome). In some embodiments, the level of the recombinant version is at least 10%, at least 20%, at least 30%, at least 40%, at least 50%, at least 60%, at least 70%, at least 80%, at least 90%, at least 100%, at least 110%, or at least 120% of the level in a healthy cell. In some embodiments, the level of the recombinant version is no greater than 10%, no greater than 20%, no greater than 30%, no greater than 40%, no greater than 50%, no greater than 60%, no greater than 70%, no greater than 80%, no greater than 90%, no greater than 100%, no greater than 110%, or no greater than 120% of the level in a healthy cell.

[0048] The protein encoded by the mRNA may be recombinant. In some embodiments, the protein is considered recombinant because it is produced from a recombinant nucleic acid, or is produced from an mRNA encoded by a recombinant nucleic acid. In some embodiments, the protein is further considered recombinant in that it includes a modification relative to an endogenous version of the protein. In embodiments, the recombinant version of the target protein produced by the recombinant mRNA has at least 80% sequence identity to an endogenous version of the target protein. In embodiments, the recombinant version of the target protein produced by the recombinant mRNA has at least 85% sequence identity to an endogenous version of the target protein. In embodiments, the recombinant version of the target protein produced by the recombinant mRNA has at least 90% sequence identity to an endogenous version of the target protein. In embodiments, the recombinant version of the target protein produced by the recombinant mRNA has at least 91% sequence identity to an endogenous version of the target protein. In embodiments, the recombinant version of the target protein produced by the recombinant mRNA has at least 92% sequence identity to an endogenous version of the target protein. In embodiments, the recombinant version of the target protein produced by the recombinant mRNA has at least 93% sequence identity to an endogenous version of the target protein. In embodiments, the recombinant version of the target protein produced by the recombinant mRNA has at least 94% sequence identity to an endogenous version of the target protein. In embodiments, the recombinant version of the target protein produced by the recombinant mRNA has at least 95% sequence identity to an endogenous target protein. In embodiments, the recombinant version of the target protein produced by the recombinant mRNA has at least 96% sequence identity to an endogenous target protein. In embodiments, the recombinant version of the target protein produced by the recombinant mRNA has at least 97% sequence identity to an endogenous version of the target protein. In embodiments, the recombinant version of the target protein produced by the recombinant mRNA has at least 98% sequence identity to an endogenous version of the target protein. In embodiments, the recombinant version of the target protein produced by the recombinant mRNA has at least 99% sequence identity to an endogenous version of the target protein. In embodiments, the recombinant version of the target protein produced by the recombinant mRNA includes the sequence of an endogenous version of the target protein. In embodiments, the recombinant version of the target protein produced by the recombinant mRNA is the sequence of an endogenous version of the target protein. In some embodiments, the recombinant version of the target protein has less than 100%, less than 99%, less than 98%, less than 97%, less than 96%, less than 95%, less than 94%, less than 93%, less than 92%, less than 91%, less than 90%, or less than 85%, sequence identity to the endogenous version of the target protein.

[0049] In some aspects is provided an expression system. The system may be useful for altering gene expression. The system may include a silencing module. The silencing module may include a silencing module deoxyribonucleic acid (DNA) sequence. The silencing module may include a first promoter sequence. The silencing module may include an exonic splicing silencer (ESS) nucleic acid sequence. The silencing module may include an antisense nucleic acid sequence targeting an endogenous target ribonucleic acid (RNA). The silencing module may include an Sm binding site sequence. The silencing module may include a 3′ hairpin sequence. The silencing module may include a 3′ terminator sequence. The system may include a target synthesis module. The synthesis module may include a synthesis module DNA sequence. The synthesis module may include a second promoter sequence. The synthesis module may include a 5′ untranslated region (UTR) sequence. The synthesis module may include a nucleic acid coding sequence (CDS) encoding a target protein. The synthesis module may include a 3′ UTR sequence. In some aspects, the silencing module encodes a modified U7 small nuclear RNA (snRNA) that silences or reduces endogenous the target protein expression. In some aspects, the synthesis module encodes a recombinant messenger RNA (mRNA) that generates recombinant target protein.

[0050] In an aspect is provided an expression system for altering gene expression, including: a silencing module deoxyribonucleic acid (DNA) sequence including: a first promoter sequence, an exonic splicing silencer (ESS) nucleic acid sequence, an antisense nucleic acid sequence targeting an endogenous target ribonucleic acid (RNA), an Sm binding site sequence, a 3′ hairpin sequence, and a 3′ terminator sequence; and an synthesis module DNA sequence including: a second promoter sequence, a 5′ untranslated region (UTR) sequence, a nucleic acid coding sequence (CDS) encoding a target protein, and a 3′ UTR sequence; wherein the silencing module encodes a modified U7 small nuclear RNA (snRNA) that silences or reduces endogenous target protein expression, and the target synthesis module encodes a recombinant messenger RNA (mRNA) that generates a recombinant version of the target protein.

[0051] As an example, some aspects include an expression system for altering gene expression, including: a silencing module deoxyribonucleic acid (DNA) sequence including: a first promoter sequence, an exonic splicing silencer (ESS) nucleic acid sequence, an antisense nucleic acid sequence targeting an endogenous target such as MECP2 ribonucleic acid (RNA), an Sm binding site sequence, a 3′ hairpin sequence, and a 3′ terminator sequence; and a target synthesis module DNA sequence including: a second promoter sequence, a 5′ untranslated region (UTR) sequence, a nucleic acid coding sequence (CDS) encoding the target, and a 3′ UTR sequence; wherein the silencing module encodes a modified U7 small nuclear RNA (snRNA) that silences or reduces endogenous target expression, and the target synthesis module encodes a recombinant messenger RNA (mRNA) that generates recombinant target protein. In some aspects is provided an expression system. The system may be useful for altering gene expression. The system may include a silencing module. The silencing module may include a silencing module deoxyribonucleic acid (DNA) sequence. The silencing module may include a first promoter sequence. The silencing module may include an exonic splicing silencer (ESS) nucleic acid sequence. The silencing module may include an antisense nucleic acid sequence targeting an endogenous target ribonucleic acid (RNA). The silencing module may include an Sm binding site sequence. The silencing module may include a 3′ hairpin sequence. The silencing module may include a 3′ terminator sequence. The system may include target synthesis module (e.g. MECP2 synthesis module). The synthesis module may include a synthesis module DNA sequence. The synthesis module may include a second promoter sequence. The synthesis module may include a 5′ untranslated region (UTR) sequence. The synthesis module may include a nucleic acid coding sequence (CDS) encoding the target. The synthesis module may include a 3′ UTR sequence. In some aspects, the silencing module encodes a modified U7 small nuclear RNA (snRNA) that silences or reduces endogenous target protein expression. In some aspects, the target synthesis module encodes a recombinant messenger RNA (mRNA) that generates recombinant target protein.

[0052] The term “snRNA” and “small nuclear RNA” may include RNA molecules typically involved in processing other RNA molecules (e.g. pre-mRNA, histone RNA, etc.). For example, snRNA may play a role in splicing pre-mRNA molecules. For example, snRNA are capable of binding and/or recruiting proteins involved in RNA processing. The snRNA/protein complex may be referred to as a small nuclear ribonucleoprotein (snRNP). For example, an snRNA may bind to one or more Sm proteins, which may typically regulate and are involved in pre-mRNA processing. In embodiments, the snRNA is between about 40 and 200 nt in length. In embodiments, the snRNA is U7 snRNA.

[0053] The terms “U7 small nuclear snRNA” and “U7 snRNA” may refer to an RNA molecule that may form part of the small nuclear ribonucleoprotein complex (U7 snRNP), or may play a role in processing of mRNAs. A “modified U7 small nuclear snRNA” or “modified snRNA may refer to a U7 snRNA that includes one or more sequence modifications to affect splicing of a target RNA. The modified snRNA may also include a backbone modification. In embodiments, the U7 snRNA is modified to target a portion of a target mRNA. In embodiments, the modified U7 snRNA may target or bind to an endogenous target RNA (e.g. an endogenous target pre-mRNA, or an endogenous target mRNA). In embodiments, the U7 snRNA is modified to be at least partially complementary to the endogenous target RNA (e.g. to an exon of the target RNA). In embodiments, modification of the U7 snRNA sequence inhibits binding of splicing factors. Thus, in embodiments, the modified U7 snRNA does not bind splicing factors. In embodiments, modification of the U7 snRNA allows recruitment of splicing proteins capable of splicing an endogenous target RNA (e.g. target pre-mRNA).

[0054] An “exonic splicing silencer” or “ESS” sequence may refer to a nucleic acid sequence that may inhibit or downregulate splicing of an endogenous target RNA (e.g. target pre-mRNA or target mRNA). In embodiments, the ESS inhibits or downregulates splicing of an endogenous target pre-mRNA by inhibiting binding or recruitment of one or more components of the splicing complex to the endogenous target RNA. In embodiments, the ESS inhibits or downregulates splicing of an endogenous target pre-mRNA by inducing exon skipping. Thus, in embodiments, the ESS inhibits or downregulates splicing of an endogenous target RNA. An example of an ESS sequence may include 5′-ATGATAGGGACTTAGGGTGA-3′ (SEQ ID NO: 240), 5′-TTTGTTCCGTGGGTGGTTTA-3′ (SEQ ID NO: 241), or 5′-TGGGGGGAGGTAGGTAGGTA-3′ (SEQ ID NO: 242). The ESS sequence may be at least 90%, 91%, 92%, 93%, 94%, 95%, 96%, 97%, 98%, or 99%, identical to any of the aforesaid ESS sequences or a reverse complement thereof. Ts may be replaced with Us when the sequences is an RNA sequence (as opposed to, for example, a DNA sequence).

[0055] A antisense nucleic acid sequence targeting a target ribonucleic acid (RNA) may refer to a nucleic acid sequence capable of recruiting the silencing module to a target RNA or a portion thereof. In embodiments, the antisense nucleic acid sequence targeting the target RNA includes a sequence at least partially complementary to a portion of the target RNA. In embodiments, the antisense nucleic acid sequence targeting the target RNA includes a sequence at least partially complementary to a splice site of the target RNA. In embodiments, the antisense nucleic acid sequence targeting an endogenous target RNA binds to the endogenous target RNA or a portion thereof. In embodiments, the target endogenous RNA encodes an endogenous version of a target protein. For example, the target endogenous RNA may be an endogenous mRNA including introns and exons. Thus, in embodiments, the target endogenous RNA is an RNA involved in production of an endogenous protein.

[0056] The term “target protein” may refer to a protein in which the expression level is modified or sought to be modified by a method or system provided herein. Some aspects herein include decreasing an endogenous version of a target protein, and increasing expression of a recombinant version of a target protein.

[0057] An “Sm binding site sequence” may include a sequence that binds to or recruits one or more proteins involved in splicing RNA. In embodiments, the Sm binding site sequence binds to or recruits one or more Sm proteins. An “Sm protein” may include one or more proteins found in the spliceosomal small nuclear ribonucleoprotein complex. In embodiments, the Sm binding site binds to or recruits one or more of SmB/B0, SmD3,SmE, SmF and SmG. In embodiments, the Sm binding site sequence binds to or recruit Lsm proteins (e.g. Lsm10, Lsm11). In embodiments, the Sm binding site sequence does not bind to or recruit Lsm proteins (e.g. Lsm10, Lsm11). In embodiments, the Sm binding site binds or recruits one or more pre-mRNA spliceosome proteins.

[0058] The terms “hairpin sequence”, “stem loop sequence”, “hairpin loop sequence” may be interchangeable, and may refer to a region of an RNA oligonucleotide (e.g. RNA stem loop oligonucleotide) that that includes two nucleotide sequences that base pair to form a double-stranded (e.g. RNA double-helix) structure (e.g. the stem) with a non-base paired structure (e.g. the loop) at one end of the double-stranded structure. The double-stranded structure (e.g. stem) in the RNA stem loop may be referred to as an “RNA double-helix”. In embodiments, the hairpin sequence may form a portion of the modified U7 snRNA. In embodiments, the hairpin sequence may increase stability of the modified U7 small snRNA. In embodiments, the hairpin sequence is located 3′ of the antisense nucleic acid sequence targeting an endogenous target RNA.

[0059] The terms “terminator sequence” or “terminator” may include a sequence that regulates RNA production. For example, a terminator sequence may signal the end of an RNA molecule. In embodiments, the terminator sequence refers to a sequence at the 3′ end of the snRNA silencing module. In embodiments, the terminator sequence regulates stability of an RNA molecule. For example, the terminator sequence may increase stability of the U7 snRNA.

### Systems for Altering Target Expression

[0060] In some aspects is provided a system for altering gene expression. The system may include one or more RNAs, such as a U7 RNA or silencing module, and an RNA synthesis module. The system may be encoded by an expression system or an expression construct herein. The system may alter expression of a target. Some examples of targets are MECP2 and SCN2A.

[0061] An example of such a system is provided in FIG. 1A, which includes a synthesis module with weak promoter driving a coding sequence of a target, in addition to UTRs surrounding the coding sequence+a silencing module with a snRNA cassette that includes a antisense nucleic acid sequence that binds with a target mRNA, as well as snRNA regulatory sequences. Any of the aspects included in FIG. 1 may be useful in a method, composition or system herein.

[0062] In some aspects is provided a system for altering gene expression. The system may include a dual RNA system including. The system may include a silencing module. The silencing module may include a U7 small nuclear RNA (snRNA) silencing module. The silencing module may include an exonic splicing silencer (ESS) nucleic acid sequence. The silencing module may include a antisense nucleic acid sequence. The antisense nucleic acid sequence may bind an endogenous target ribonucleic acid (RNA). The silencing module may include an Sm binding site sequence. The silencing module may include a 3′ hairpin sequence. The system may include a synthesis module. The synthesis module may include a target messenger RNA (mRNA) synthesis module. The synthesis module may include a 5′ untranslated region (UTR) sequence. The synthesis module a nucleic acid coding sequence (CDS). The CDS may encode encoding a target protein (e.g. a recombinant version of the target protein). The synthesis module may include a 3′ UTR. In some aspects, the U7 snRNA silencing module silences or reduces an endogenous target protein expression. In some aspects, the target mRNA synthesis module generates a recombinant version of the target protein.

[0063] In some aspects is provided a dual RNA system for altering gene expression, including: a U7 small nuclear RNA (snRNA) silencing module including: an exonic splicing silencer (ESS) nucleic acid sequence, a antisense nucleic acid sequence that binds an endogenous target ribonucleic acid (RNA), an Sm binding site sequence, and a 3′ hairpin sequence; and a target messenger RNA (mRNA) synthesis module including: a 5′ untranslated region (UTR) sequence, a nucleic acid coding sequence (CDS) encoding a target protein, and a 3′ UTR sequence; wherein the U7 snRNA silencing module silences or reduces an endogenous target protein expression, and the target mRNA synthesis module generates a recombinant version of the target protein.

[0064] As an example, in some aspects is provided a dual RNA system for altering gene expression, including: a U7 small nuclear RNA (snRNA) silencing module including: an exonic splicing silencer (ESS) nucleic acid sequence, a antisense nucleic acid sequence that binds an endogenous target ribonucleic acid (RNA) (e.g. MECP2 RNA), an Sm binding site sequence, and a 3′ hairpin sequence; and a target messenger RNA (mRNA) synthesis module including: a 5′ untranslated region (UTR) sequence, a nucleic acid coding sequence (CDS) encoding the target, and a 3′ UTR sequence; wherein the U7 snRNA silencing module silences or reduces endogenous target protein expression, and the target mRNA synthesis module generates recombinant target protein. In some aspects is provided a system for altering gene expression. The system may include a dual RNA system including. The system may include a silencing module. The silencing module may include a U7 small nuclear RNA (snRNA) silencing module. The silencing module may include an exonic splicing silencer (ESS) nucleic acid sequence. The silencing module may include a antisense nucleic acid sequence. The antisense nucleic acid sequence may bind an endogenous target ribonucleic acid (RNA). The silencing module may include an Sm binding site sequence. The silencing module may include a 3′ hairpin sequence. The system may include a synthesis module. The synthesis module may include a target messenger RNA (mRNA) synthesis module. The synthesis module may include a 5′ untranslated region (UTR) sequence. The synthesis module a nucleic acid coding sequence (CDS). The CDS may encode encoding a target protein (e.g. a recombinant MECP2 protein). The synthesis module may include a 3′ UTR. In some aspects, the U7 snRNA silencing module silences or reduces an endogenous target protein expression. In some aspects, the target mRNA synthesis module generates a recombinant version of the target protein.

[0065] Provided herein, inter alia, are systems for modulating expression levels of a target gene in a cell. For example, systems provided herein including embodiments thereof are contemplated to be useful for a producing a recombinant version of a target protein (e.g. a protein affected by a genetic disorder) in a cell, wherein the expression level of the recombinant version of the protein is at least 20%, 30%, 40%, 50%, 60%, 70%, 80%, 85%, 90%, 91%, 92%, 93%, 95%, 95%, 96%, 97%, 98%, 99%, or 100% of the expression level of the endogenous protein in a healthy cell (e.g. a cell without a genetic disorder (e.g. Rett syndrome)). In embodiments, the expression level of the recombinant gene is at least 0.2-fold, 0.3-fold, 0.4-fold, 0.5-fold, 0.6-fold, 0.7-fold, 0.8-fold, 0.9-fold, or 1-fold of the expression level of the endogenous gene in a healthy cell (e.g. a cell without a genetic disorder, a cell without Rett syndrome). In embodiments, the expression level of the recombinant protein is less than 4-fold, 3-fold, 2-fold, 1.8-fold, 1.6-fold, 1.5-fold, 1.4-fold, 1.3-fold, 1.2-fold, 1.1-fold, 1-fold, 0.9-fold, 0.8-fold, 0.7-fold, 0.6-fold, or 0.5-fold than the expression level of the endogenous protein in a healthy cell (e.g. a cell without Rett syndrome).

[0066] Thus, in an aspect is provided a system for altering gene expression, including: a silencing module including an exonic splicing silencer (ESS) nucleic acid sequence coupled with a antisense nucleic acid sequence targeting an endogenous target ribonucleic acid (RNA); and a synthesis module including a nucleic acid coding sequence (CDS) that encodes a recombinant version of the target RNA. For the system provided herein, in embodiments, the target RNA encodes a target protein. In embodiments, the endogenous target RNA includes an mRNA splice site.

[0067] In embodiments, the system provided herein is capable of synthesizing or producing the recombinant version of the target protein at a level comparable to the expression level of the endogenous target protein in a healthy cell (e.g. a cell without a genetic disorder). For the system provided herein, in embodiments, the expression level of the recombinant version of the target protein is between about 0.2-fold to about 4-fold of the expression level of the endogenous protein in a healthy cell (e.g. a cell without a genetic disorder (e.g. Rett syndrome)). In embodiments, the expression level of the recombinant version of the target protein is between about 0.3-fold to about 4-fold of the expression level of the endogenous protein in a healthy cell (e.g. a cell without a genetic disorder). In embodiments, the expression level of the recombinant version of the target protein is between about 0.4-fold to about 4-fold of the expression level of the endogenous protein in a healthy cell (e.g. a cell without a genetic disorder). In embodiments, the expression level of the recombinant version of the target protein is between about 0.5-fold to about 4-fold of the expression level of the endogenous protein in a healthy cell (e.g. a cell without a genetic disorder). In embodiments, the expression level of the recombinant version of the target protein is between about 0.6-fold to about 4-fold of the expression level of the endogenous protein in a healthy cell (e.g. a cell without a genetic disorder). In embodiments, the expression level of the recombinant version of the target protein is between about 0.7-fold to about 4-fold of the expression level of the endogenous protein in a healthy cell (e.g. a cell without a genetic disorder). In embodiments, the expression level of the recombinant version of the target protein is between about 0.8-fold to about 4-fold of the expression level of the endogenous protein in a healthy cell (e.g. a cell without a genetic disorder). In embodiments, the expression level of the recombinant version of the target protein is between about 0.9-fold to about 4-fold of the expression level of the endogenous protein in a healthy cell (e.g. a cell without a genetic disorder). In embodiments, the expression level of the recombinant version of the target protein is between about 1-fold to about 4-fold of the expression level of the endogenous protein in a healthy cell (e.g. a cell without a genetic disorder).

[0068] In embodiments, the expression level of the recombinant version of the target protein is between about 1.1-fold to about 4-fold of the expression level of the endogenous protein in a healthy cell (e.g. a cell without a genetic disorder). In embodiments, the expression level of the recombinant version of the target protein is between about 1.2-fold to about 4-fold of the expression level of the endogenous protein in a healthy cell (e.g. a cell without a genetic disorder). In embodiments, the expression level of the recombinant version of the target protein is between about 1.3-fold to about 4-fold of the expression level of the endogenous protein in a healthy cell (e.g. a cell without a genetic disorder). In embodiments, the expression level of the recombinant version of the target protein is between about 1.4-fold to about 4-fold of the expression level of the endogenous protein in a healthy cell (e.g. a cell without a genetic disorder). In embodiments, the expression level of the recombinant version of the target protein is between about 1.5-fold to about 4-fold of the expression level of the endogenous protein in a healthy cell (e.g. a cell without a genetic disorder). In embodiments, the expression level of the recombinant version of the target protein is between about 1.6-fold to about 4-fold of the expression level of the endogenous protein in a healthy cell (e.g. a cell without a genetic disorder). In embodiments, the expression level of the recombinant version of the target protein is between about 1.7-fold to about 4-fold of the expression level of the endogenous protein in a healthy cell (e.g. a cell without a genetic disorder). In embodiments, the expression level of the recombinant version of the target protein is between about 1.8-fold to about 4-fold of the expression level of the endogenous protein in a healthy cell (e.g. a cell without a genetic disorder). In embodiments, the expression level of the recombinant version of the target protein is between about 1.9-fold to about 4-fold of the expression level of the endogenous protein in a healthy cell (e.g. a cell without a genetic disorder). In embodiments, the expression level of the recombinant version of the target protein is between about 2-fold to about 4-fold of the expression level of the endogenous protein in a healthy cell (e.g. a cell without a genetic disorder). In embodiments, the expression level of the recombinant version of the target protein is between about 2.1-fold to about 4-fold of the expression level of the endogenous protein in a healthy cell (e.g. a cell without a genetic disorder). In embodiments, the expression level of the recombinant version of the target protein is between about 2.2-fold to about 4-fold of the expression level of the endogenous protein in a healthy cell (e.g. a cell without a genetic disorder). In embodiments, the expression level of the recombinant version of the target protein is between about 2.3-fold to about 4-fold of the expression level of the endogenous protein in a healthy cell (e.g. a cell without a genetic disorder). In embodiments, the expression level of the recombinant version of the target protein is between about 2.4-fold to about 4-fold of the expression level of the endogenous protein in a healthy cell (e.g. a cell without a genetic disorder). In embodiments, the expression level of the recombinant version of the target protein is between about 2.5-fold to about 4-fold of the expression level of the endogenous protein in a healthy cell (e.g. a cell without a genetic disorder). In embodiments, the expression level of the recombinant version of the target protein is between about 2.6-fold to about 4-fold of the expression level of the endogenous protein in a healthy cell (e.g. a cell without a genetic disorder). In embodiments, the expression level of the recombinant version of the target protein is between about 2.7-fold to about 4-fold of the expression level of the endogenous protein in a healthy cell (e.g. a cell without a genetic disorder). In embodiments, the expression level of the recombinant version of the target protein is between about 2.8-fold to about 4-fold of the expression level of the endogenous protein in a healthy cell (e.g. a cell without a genetic disorder). In embodiments, the expression level of the recombinant version of the target protein is between about 2.9-fold to about 4-fold of the expression level of the endogenous protein in a healthy cell (e.g. a cell without a genetic disorder). In embodiments, the expression level of the recombinant version of the target protein is between about 3-fold to about 4-fold of the expression level of the endogenous protein in a healthy cell (e.g. a cell without a genetic disorder). In embodiments, the expression level of the recombinant version of the target protein is between about 3.1-fold to about 4-fold of the expression level of the endogenous protein in a healthy cell (e.g. a cell without a genetic disorder). In embodiments, the expression level of the recombinant version of the target protein is between about 3.2-fold to about 4-fold of the expression level of the endogenous protein in a healthy cell (e.g. a cell without a genetic disorder). In embodiments, the expression level of the recombinant version of the target protein is between about 3.3-fold to about 4-fold of the expression level of the endogenous protein in a healthy cell (e.g. a cell without a genetic disorder). In embodiments, the expression level of the recombinant version of the target protein is between about 3.4-fold to about 4-fold of the expression level of the endogenous protein in a healthy cell (e.g. a cell without a genetic disorder). In embodiments, the expression level of the recombinant version of the target protein is between about 3.5-fold to about 4-fold of the expression level of the endogenous protein in a healthy cell (e.g. a cell without a genetic disorder). In embodiments, the expression level of the recombinant version of the target protein is between about 3.6-fold to about 4-fold of the expression level of the endogenous protein in a healthy cell (e.g. a cell without a genetic disorder). In embodiments, the expression level of the recombinant version of the target protein is between about 3.7-fold to about 4-fold of the expression level of the endogenous protein in a healthy cell (e.g. a cell without a genetic disorder). In embodiments, the expression level of the recombinant version of the target protein is between about 3.8-fold to about 4-fold of the expression level of the endogenous protein in a healthy cell (e.g. a cell without a genetic disorder). In embodiments, the expression level of the recombinant version of the target protein is between about 3.9-fold to about 4-fold of the expression level of the endogenous protein in a healthy cell (e.g. a cell without a genetic disorder). In embodiments, the expression level of the recombinant version of the target protein is about 0.2-fold, 0.3-fold, 0.4-fold, 0.5-fold, 0.6-fold, 0.7-fold, 0.8-fold, 0.9-fold, 1-fold, 1.1-fold, 1.2-fold, 1.3-fold, 1.4-fold, 1.5-fold, 1.6-fold, 1.7-fold, 1.8-fold, 1.9-fold, 2-fold, 2.1-fold, 2.2-fold, 2.3-fold, 2.4-fold, 2.5-fold, 2.6-fold, 2.7-fold, 2.8-fold, 2.9-fold, 3-fold, 3.1-fold, 3.2-fold, 3.3-fold, 3.4-fold, 3.5-fold, 3.6-fold, 3.7-fold, 3.8-fold, 3.9-fold, or 4-fold of the expression level of the endogenous protein in a healthy cell (e.g. a cell without a genetic disorder, a cell without Rett Syndrome). In embodiments, the expression level of the recombinant version of the target protein is no greater than 0.2-fold, 0.3-fold, 0.4-fold, 0.5-fold, 0.6-fold, 0.7-fold, 0.8-fold, 0.9-fold, 1-fold, 1.1-fold, 1.2-fold, 1.3-fold, 1.4-fold, 1.5-fold, 1.6-fold, 1.7-fold, 1.8-fold, 1.9-fold, 2-fold, 2.1-fold, 2.2-fold, 2.3-fold, 2.4-fold, 2.5-fold, 2.6-fold, 2.7-fold, 2.8-fold, 2.9-fold, 3-fold, 3.1-fold, 3.2-fold, 3.3-fold, 3.4-fold, 3.5-fold, 3.6-fold, 3.7-fold, 3.8-fold, 3.9-fold, or 4-fold of the expression level of the endogenous protein in a healthy cell (e.g. a cell without a genetic disorder, a cell without Rett Syndrome). In embodiments, the expression level of the recombinant version of the target protein is no greater than the expression level of the endogenous protein in a healthy cell (e.g. a cell without a genetic disorder, a cell without Rett Syndrome).

[0069] The systems provided herein are further capable of silencing (e.g. inhibiting, decreasing, or downregulating) the expression level of the endogenous target gene (e.g. a gene affected by a genetic disorder) in a cell. In embodiments, the system decreases the expression level of the endogenous gene at least 20%, 30%, 40%, 50%, 60%, 70%, 80%, 85%, 90%, 91%, 92%, 93%, 95%, 95%, 96%, 97%, 98%, 99%, or 100% compared to the expression level of the endogenous gene in the absence of the system. In embodiments, the system decreases the expression level of the endogenous gene wherein the expression level of the endogenous gene in a cell is undetectable. In embodiments, the expression level of the endogenous gene is measured by the level of endogenous target protein produced by the endogenous gene.

[0070] In embodiments, the system decreases the expression level of the endogenous gene from about 20% to about 100% compared to the expression level of the endogenous gene in the absence of the system. In embodiments, the system decreases the expression level of the endogenous gene from about 25% to about 100% compared to the expression level of the endogenous gene in the absence of the system. In embodiments, the system decreases the expression level of the endogenous gene from about 30% to about 100% compared to the expression level of the endogenous gene in the absence of the system. In embodiments, the system decreases the expression level of the endogenous gene from about 35% to about 100% compared to the expression level of the endogenous gene in the absence of the system. In embodiments, the system decreases the expression level of the endogenous gene from about 40% to about 100% compared to the expression level of the endogenous gene in the absence of the system. In embodiments, the system decreases the expression level of the endogenous gene from about 45% to about 100% compared to the expression level of the endogenous gene in the absence of the system. In embodiments, the system decreases the expression level of the endogenous gene from about 50% to about 100% compared to the expression level of the endogenous gene in the absence of the system. In embodiments, the system decreases the expression level of the endogenous gene from about 55% to about 100% compared to the expression level of the endogenous gene in the absence of the system. In embodiments, the system decreases the expression level of the endogenous gene from about 60% to about 100% compared to the expression level of the endogenous gene in the absence of the system. In embodiments, the system decreases the expression level of the endogenous gene from about 65% to about 100% compared to the expression level of the endogenous gene in the absence of the system. In embodiments, the system decreases the expression level of the endogenous gene from about 70% to about 100% compared to the expression level of the endogenous gene in the absence of the system. In embodiments, the system decreases the expression level of the endogenous gene from about 75% to about 100% compared to the expression level of the endogenous gene in the absence of the system. In embodiments, the system decreases the expression level of the endogenous gene from about 80% to about 100% compared to the expression level of the endogenous gene in the absence of the system. In embodiments, the system decreases the expression level of the endogenous gene from about 85% to about 100% compared to the expression level of the endogenous gene in the absence of the system. In embodiments, the system decreases the expression level of the endogenous gene from about 90% to about 100% compared to the expression level of the endogenous gene in the absence of the system. In embodiments, the system decreases the expression level of the endogenous gene from about 95% to about 100% compared to the expression level of the endogenous gene in the absence of the system.

[0071] In embodiments, the system decreases the expression level of the endogenous gene from about 20% to about 95% compared to the expression level of the endogenous gene in the absence of the system. In embodiments, the system decreases the expression level of the endogenous gene from about 20% to about 90% compared to the expression level of the endogenous gene in the absence of the system. In embodiments, the system decreases the expression level of the endogenous gene from about 20% to about 85% compared to the expression level of the endogenous gene in the absence of the system. In embodiments, the system decreases the expression level of the endogenous gene from about 20% to about 80% compared to the expression level of the endogenous gene in the absence of the system. In embodiments, the system decreases the expression level of the endogenous gene from about 20% to about 75% compared to the expression level of the endogenous gene in the absence of the system. In embodiments, the system decreases the expression level of the endogenous gene from about 20% to about 70% compared to the expression level of the endogenous gene in the absence of the system. In embodiments, the system decreases the expression level of the endogenous gene from about 20% to about 65% compared to the expression level of the endogenous gene in the absence of the system. In embodiments, the system decreases the expression level of the endogenous gene from about 20% to about 60% compared to the expression level of the endogenous gene in the absence of the system. In embodiments, the system decreases the expression level of the endogenous gene from about 20% to about 55% compared to the expression level of the endogenous gene in the absence of the system. In embodiments, the system decreases the expression level of the endogenous gene from about 20% to about 50% compared to the expression level of the endogenous gene in the absence of the system. In embodiments, the system decreases the expression level of the endogenous gene from about 20% to about 45% compared to the expression level of the endogenous gene in the absence of the system. In embodiments, the system decreases the expression level of the endogenous gene from about 20% to about 40% compared to the expression level of the endogenous gene in the absence of the system. In embodiments, the system decreases the expression level of the endogenous gene from about 20% to about 35% compared to the expression level of the endogenous gene in the absence of the system. In embodiments, the system decreases the expression level of the endogenous gene from about 20% to about 30% compared to the expression level of the endogenous gene in the absence of the system. In embodiments, the system decreases the expression level of the endogenous gene from about 20% to about 25% compared to the expression level of the endogenous gene in the absence of the system. In embodiments, the system decreases the expression level of the endogenous gene about 20%, 25%, 30%, 35%, 40%, 45%, 50%, 55%, 60%, 65%, 70%, 75%, 80%, 85%, 90%, 95%, or 100% compared to the expression level of the endogenous gene in the absence of the system. In embodiments, the system decreases the expression level of the endogenous gene at least about 20%, 25%, 30%, 35%, 40%, 45%, 50%, 55%, 60%, 65%, 70%, 75%, 80%, 85%, 90%, 95%, or 100% compared to the expression level of the endogenous gene in the absence of the system.

[0072] In embodiments, the system silences (e.g. downregulates, decreases, or inhibits) the expression level of an endogenous gene in a cell and expresses a recombinant version of the gene in the cell, wherein the total expression level (including the endogenous and the recombinant version of the gene) of the gene is about the expression level of the endogenous gene in a healthy cell (e.g. a cell without a genetic disorder). In embodiments, the system silences (e.g. downregulates, decreases, or inhibits) the expression level of an endogenous gene in a cell and expresses a recombinant version of the gene in the cell, wherein the total expression level (including the endogenous and the recombinant version of the gene) of the gene is less than 4-fold, 3-fold, 2-fold, 1.8-fold, 1.6-fold, 1.5-fold, 1.4-fold, 1.3-fold, 1.2-fold, 1.1-fold, 1-fold, 0.9-fold, 0.8-fold, 0.7-fold, 0.6-fold, or 0.5-fold of the expression level of the endogenous gene in a healthy cell (e.g. a cell without a genetic disorder). In embodiments, the system silences (e.g. downregulates, decreases, or inhibits) the expression level of an endogenous gene in a cell and expresses a recombinant version of the gene in the cell, wherein the total expression level (including the endogenous and the recombinant version of the gene) of the gene is at least 0.2-fold, 0.3-fold, 0.4-fold, 0.5-fold, 0.6-fold, 0.7-fold, 0.8-fold, 0.9-fold, or 1-fold of the expression level of the endogenous gene in a healthy cell (e.g. a cell without a genetic disorder). In embodiments, the total expression level (including the endogenous and the recombinant versions of the gene) of the gene is at least 20%, 30%, 40%, 50%, 60%, 70%, 80%, 85%, 90%, 91%, 92%, 93%, 94%, 95%, 96%, 97%, 98%, 99% or 100% of the expression level of the endogenous gene in a healthy cell (e.g. a cell without a genetic disorder).

[0073] In embodiments, the system silences (e.g. downregulates, decreases, or inhibits) the expression level of an endogenous gene in a cell and expresses a recombinant version of the gene in the cell, wherein the total expression level (including the endogenous and the recombinant versions of the gene) of the gene is from about 0.2-fold to about 4-fold of the expression level of the endogenous gene in a healthy cell (e.g. a cell without a genetic disorder (e.g. Rett Syndrome)). In embodiments, the system silences (e.g. downregulates, decreases, or inhibits) the expression level of an endogenous gene in a cell and expresses a recombinant version of the gene in the cell, wherein the total expression level (including the endogenous and the recombinant versions of the gene) of the gene is from about 0.3-fold to about 4-fold of the expression level of the endogenous gene in a healthy cell (e.g. a cell without a genetic disorder (e.g. Rett Syndrome)). In embodiments, the system silences (e.g. downregulates, decreases, or inhibits) the expression level of an endogenous gene in a cell and expresses a recombinant version of the gene in the cell, wherein the total expression level (including the endogenous and the recombinant versions of the gene) of the gene is from about 0.4-fold to about 4-fold of the expression level of the endogenous gene in a healthy cell (e.g. a cell without a genetic disorder). In embodiments, the system silences (e.g. downregulates, decreases, or inhibits) the expression level of an endogenous gene in a cell and expresses a recombinant version of the gene in the cell, wherein the total expression level (including the endogenous and the recombinant versions of the gene) of the gene is from about 0.5-fold to about 4-fold of the expression level of the endogenous gene in a healthy cell (e.g. a cell without a genetic disorder). In embodiments, the system silences (e.g. downregulates, decreases, or inhibits) the expression level of an endogenous gene in a cell and expresses a recombinant version of the gene in the cell, wherein the total expression level (including the endogenous and the recombinant versions of the gene) of the gene is from about 0.6-fold to about 4-fold of the expression level of the endogenous gene in a healthy cell (e.g. a cell without a genetic disorder). In embodiments, the system silences (e.g. downregulates, decreases, or inhibits) the expression level of an endogenous gene in a cell and expresses a recombinant version of the gene in the cell, wherein the total expression level (including the endogenous and the recombinant versions of the gene) of the gene is from about 0.7-fold to about 4-fold of the expression level of the endogenous gene in a healthy cell (e.g. a cell without a genetic disorder). In embodiments, the system silences (e.g. downregulates, decreases, or inhibits) the expression level of an endogenous gene in a cell and expresses a recombinant version of the gene in the cell, wherein the total expression level (including the endogenous and the recombinant versions of the gene) of the gene is from about 0.8-fold to about 4-fold of the expression level of the endogenous gene in a healthy cell (e.g. a cell without a genetic disorder). In embodiments, the system silences (e.g. downregulates, decreases, or inhibits) the expression level of an endogenous gene in a cell and expresses a recombinant version of the gene in the cell, wherein the total expression level (including the endogenous and the recombinant versions of the gene) of the gene is from about 0.9-fold to about 4-fold of the expression level of the endogenous gene in a healthy cell (e.g. a cell without a genetic disorder). In embodiments, the system silences (e.g. downregulates, decreases, or inhibits) the expression level of an endogenous gene in a cell and expresses a recombinant version of the gene in the cell, wherein the total expression level (including the endogenous and the recombinant versions of the gene) of the gene is from about 1-fold to about 4-fold of the expression level of the endogenous gene in a healthy cell (e.g. a cell without a genetic disorder). In embodiments, the system silences (e.g. downregulates, decreases, or inhibits) the expression level of an endogenous gene in a cell and expresses a recombinant version of the gene in the cell, wherein the total expression level (including the endogenous and the recombinant versions of the gene) of the gene is from about 1.1-fold to about 4-fold of the expression level of the endogenous gene in a healthy cell (e.g. a cell without a genetic disorder). In embodiments, the system silences (e.g. downregulates, decreases, or inhibits) the expression level of an endogenous gene in a cell and expresses a recombinant version of the gene in the cell, wherein the total expression level (including the endogenous and the recombinant versions of the gene) of the gene is from about 1.2-fold to about 4-fold of the expression level of the endogenous gene in a healthy cell (e.g. a cell without a genetic disorder). In embodiments, the system silences (e.g. downregulates, decreases, or inhibits) the expression level of an endogenous gene in a cell and expresses a recombinant version of the gene in the cell, wherein the total expression level (including the endogenous and the recombinant versions of the gene) of the gene is from about 1.3-fold to about 4-fold of the expression level of the endogenous gene in a healthy cell (e.g. a cell without a genetic disorder). In embodiments, the system silences (e.g. downregulates, decreases, or inhibits) the expression level of an endogenous gene in a cell and expresses a recombinant version of the gene in the cell, wherein the total expression level (including the endogenous and the recombinant versions of the gene) of the gene is from about 1.4-fold to about 4-fold of the expression level of the endogenous gene in a healthy cell (e.g. a cell without a genetic disorder). In embodiments, the system silences (e.g. downregulates, decreases, or inhibits) the expression level of an endogenous gene in a cell and expresses a recombinant version of the gene in the cell, wherein the total expression level (including the endogenous and the recombinant versions of the gene) of the gene is from about 1.5-fold to about 4-fold of the expression level of the endogenous gene in a healthy cell (e.g. a cell without a genetic disorder). In embodiments, the system silences (e.g. downregulates, decreases, or inhibits) the expression level of an endogenous gene in a cell and expresses a recombinant version of the gene in the cell, wherein the total expression level (including the endogenous and the recombinant versions of the gene) of the gene is from about 1.6-fold to about 4-fold of the expression level of the endogenous gene in a healthy cell (e.g. a cell without a genetic disorder). In embodiments, the system silences (e.g. downregulates, decreases, or inhibits) the expression level of an endogenous gene in a cell and expresses a recombinant version of the gene in the cell, wherein the total expression level (including the endogenous and the recombinant versions of the gene) of the gene is from about 1.7-fold to about 4-fold of the expression level of the endogenous gene in a healthy cell (e.g. a cell without a genetic disorder). In embodiments, the system silences (e.g. downregulates, decreases, or inhibits) the expression level of an endogenous gene in a cell and expresses a recombinant version of the gene in the cell, wherein the total expression level (including the endogenous and the recombinant versions of the gene) of the gene is from about 1.8-fold to about 4-fold of the expression level of the endogenous gene in a healthy cell (e.g. a cell without a genetic disorder). In embodiments, the system silences (e.g. downregulates, decreases, or inhibits) the expression level of an endogenous gene in a cell and expresses a recombinant version of the gene in the cell, wherein the total expression level (including the endogenous and the recombinant versions of the gene) of the gene is from about 1.9-fold to about 4-fold of the expression level of the endogenous gene in a healthy cell (e.g. a cell without a genetic disorder). In embodiments, the system silences (e.g. downregulates, decreases, or inhibits) the expression level of an endogenous gene in a cell and expresses a recombinant version of the gene in the cell, wherein the total expression level (including the endogenous and the recombinant versions of the gene) of the gene is from about 2-fold to about 4-fold of the expression level of the endogenous gene in a healthy cell (e.g. a cell without a genetic disorder). In embodiments, the system silences (e.g. downregulates, decreases, or inhibits) the expression level of an endogenous gene in a cell and expresses a recombinant version of the gene in the cell, wherein the total expression level (including the endogenous and the recombinant versions of the gene) of the gene is from about 2.1-fold to about 4-fold of the expression level of the endogenous gene in a healthy cell (e.g. a cell without a genetic disorder). In embodiments, the system silences (e.g. downregulates, decreases, or inhibits) the expression level of an endogenous gene in a cell and expresses a recombinant version of the gene in the cell, wherein the total expression level (including the endogenous and the recombinant versions of the gene) of the gene is from about 2.2-fold to about 4-fold of the expression level of the endogenous gene in a healthy cell (e.g. a cell without a genetic disorder). In embodiments, the system silences (e.g. downregulates, decreases, or inhibits) the expression level of an endogenous gene in a cell and expresses a recombinant version of the gene in the cell, wherein the total expression level (including the endogenous and the recombinant versions of the gene) of the gene is from about 2.3-fold to about 4-fold of the expression level of the endogenous gene in a healthy cell (e.g. a cell without a genetic disorder). In embodiments, the system silences (e.g. downregulates, decreases, or inhibits) the expression level of an endogenous gene in a cell and expresses a recombinant version of the gene in the cell, wherein the total expression level (including the endogenous and the recombinant versions of the gene) of the gene is from about 2.4-fold to about 4-fold of the expression level of the endogenous gene in a healthy cell (e.g. a cell without a genetic disorder). In embodiments, the system silences (e.g. downregulates, decreases, or inhibits) the expression level of an endogenous gene in a cell and expresses a recombinant version of the gene in the cell, wherein the total expression level (including the endogenous and the recombinant versions of the gene) of the gene is from about 2.5-fold to about 4-fold of the expression level of the endogenous gene in a healthy cell (e.g. a cell without a genetic disorder). In embodiments, the system silences (e.g. downregulates, decreases, or inhibits) the expression level of an endogenous gene in a cell and expresses a recombinant version of the gene in the cell, wherein the total expression level (including the endogenous and the recombinant versions of the gene) of the gene is from about 2.6-fold to about 4-fold of the expression level of the endogenous gene in a healthy cell (e.g. a cell without a genetic disorder). In embodiments, the system silences (e.g. downregulates, decreases, or inhibits) the expression level of an endogenous gene in a cell and expresses a recombinant version of the gene in the cell, wherein the total expression level (including the endogenous and the recombinant versions of the gene) of the gene is from about 2.7-fold to about 4-fold of the expression level of the endogenous gene in a healthy cell (e.g. a cell without a genetic disorder). In embodiments, the system silences (e.g. downregulates, decreases, or inhibits) the expression level of an endogenous gene in a cell and expresses a recombinant version of the gene in the cell, wherein the total expression level (including the endogenous and the recombinant versions of the gene) of the gene is from about 2.8-fold to about 4-fold of the expression level of the endogenous gene in a healthy cell (e.g. a cell without a genetic disorder). In embodiments, the system silences (e.g. downregulates, decreases, or inhibits) the expression level of an endogenous gene in a cell and expresses a recombinant version of the gene in the cell, wherein the total expression level (including the endogenous and the recombinant versions of the gene) of the gene is from about 2.9-fold to about 4-fold of the expression level of the endogenous gene in a healthy cell (e.g. a cell without a genetic disorder). In embodiments, the system silences (e.g. downregulates, decreases, or inhibits) the expression level of an endogenous gene in a cell and expresses a recombinant version of the gene in the cell, wherein the total expression level (including the endogenous and the recombinant versions of the gene) of the gene is from about 3-fold to about 4-fold of the expression level of the endogenous gene in a healthy cell (e.g. a cell without a genetic disorder). In embodiments, the system silences (e.g. downregulates, decreases, or inhibits) the expression level of an endogenous gene in a cell and expresses a recombinant version of the gene in the cell, wherein the total expression level (including the endogenous and the recombinant versions of the gene) of the gene is from about 3.1-fold to about 4-fold of the expression level of the endogenous gene in a healthy cell (e.g. a cell without a genetic disorder). In embodiments, the system silences (e.g. downregulates, decreases, or inhibits) the expression level of an endogenous gene in a cell and expresses a recombinant version of the gene in the cell, wherein the total expression level (including the endogenous and the recombinant versions of the gene) of the gene is from about 3.2-fold to about 4-fold of the expression level of the endogenous gene in a healthy cell (e.g. a cell without a genetic disorder). In embodiments, the system silences (e.g. downregulates, decreases, or inhibits) the expression level of an endogenous gene in a cell and expresses a recombinant version of the gene in the cell, wherein the total expression level (including the endogenous and the recombinant versions of the gene) of the gene is from about 3.3-fold to about 4-fold of the expression level of the endogenous gene in a healthy cell (e.g. a cell without a genetic disorder). In embodiments, the system silences (e.g. downregulates, decreases, or inhibits) the expression level of an endogenous gene in a cell and expresses a recombinant version of the gene in the cell, wherein the total expression level (including the endogenous and the recombinant versions of the gene) of the gene is from about 3.4-fold to about 4-fold of the expression level of the endogenous gene in a healthy cell (e.g. a cell without a genetic disorder). In embodiments, the system silences (e.g. downregulates, decreases, or inhibits) the expression level of an endogenous gene in a cell and expresses a recombinant version of the gene in the cell, wherein the total expression level (including the endogenous and the recombinant versions of the gene) of the gene is from about 3.5-fold to about 4-fold of the expression level of the endogenous gene in a healthy cell (e.g. a cell without a genetic disorder). In embodiments, the system silences (e.g. downregulates, decreases, or inhibits) the expression level of an endogenous gene in a cell and expresses a recombinant version of the gene in the cell, wherein the total expression level (including the endogenous and the recombinant versions of the gene) of the gene is from about 3.6-fold to about 4-fold of the expression level of the endogenous gene in a healthy cell (e.g. a cell without a genetic disorder). In embodiments, the system silences (e.g. downregulates, decreases, or inhibits) the expression level of an endogenous gene in a cell and expresses a recombinant version of the gene in the cell, wherein the total expression level (including the endogenous and the recombinant versions of the gene) of the gene is from about 3.7-fold to about 4-fold of the expression level of the endogenous gene in a healthy cell (e.g. a cell without a genetic disorder). In embodiments, the system silences (e.g. downregulates, decreases, or inhibits) the expression level of an endogenous gene in a cell and expresses a recombinant version of the gene in the cell, wherein the total expression level (including the endogenous and the recombinant versions of the gene) of the gene is from about 3.8-fold to about 4-fold of the expression level of the endogenous gene in a healthy cell (e.g. a cell without a genetic disorder). In embodiments, the system silences (e.g. downregulates, decreases, or inhibits) the expression level of an endogenous gene in a cell and expresses a recombinant version of the gene in the cell, wherein the total expression level (including the endogenous and the recombinant versions of the gene) of the gene is from about 3.9-fold to about 4-fold of the expression level of the endogenous gene in a healthy cell (e.g. a cell without a genetic disorder). In embodiments, the system silences (e.g. downregulates, decreases, or inhibits) the expression level of an endogenous gene in a cell and expresses a recombinant version of the gene in the cell, wherein the total expression level (including the endogenous and the recombinant versions of the gene) of the gene is about 0.2-fold, 0.3-fold, 0.4-fold, 0.5-fold, 0.6-fold, 0.7-fold, 0.8-fold, 0.9-fold, 1-fold, 1.1-fold, 1.2-fold, 1.3-fold, 1.4-fold, 1.5-fold, 1.6-fold, 1.7-fold, 1.8-fold, 1.9-fold, 2-fold, 2.1-fold, 2.2-fold, 2.3-fold, 2.4-fold, 2.5-fold, 2.6-fold, 2.7-fold, 2.8-fold, 2.9-fold, 3-fold, 3.1-fold, 3.2-fold, 3.3-fold, 3.4-fold, 3.5-fold, 3.6-fold, 3.7-fold, 3.8-fold, 3.9-fold, or 4-fold of the expression level of the endogenous gene in a healthy cell (e.g. a cell without a genetic disorder). In embodiments, the system silences (e.g. downregulates, decreases, or inhibits) the expression level of an endogenous gene in a cell and expresses a recombinant version of the gene in the cell, wherein the total expression level (including the endogenous and the recombinant versions of the gene) of the gene less than about 0.2-fold, 0.3-fold, 0.4-fold, 0.5-fold, 0.6-fold, 0.7-fold, 0.8-fold, 0.9-fold, 1-fold, 1.1-fold, 1.2-fold, 1.3-fold, 1.4-fold, 1.5-fold, 1.6-fold, 1.7-fold, 1.8-fold, 1.9-fold, 2-fold, 2.1-fold, 2.2-fold, 2.3-fold, 2.4-fold, 2.5-fold, 2.6-fold, 2.7-fold, 2.8-fold, 2.9-fold, 3-fold, 3.1-fold, 3.2-fold, 3.3-fold, 3.4-fold, 3.5-fold, 3.6-fold, 3.7-fold, 3.8-fold, 3.9-fold, or 4-fold of the expression level of the endogenous gene in a healthy cell (e.g. a cell without a genetic disorder).

### Synthesis Module

[0074] Some embodiments relate to a synthesis module. The synthesis module may include a system for increasing nucleic acid expression of a target such as a target RNA or a target mRNA. For the system provided herein, in embodiments, the synthesis module includes an RNA molecule. In embodiments, the RNA molecule includes a messenger RNA (mRNA). In embodiments, the mRNA encodes a target protein or a fragment thereof. In embodiments, the mRNA of the synthesis module does not include an mRNA splice site.

[0075] In embodiments, the synthesis module includes a DNA molecule. In embodiments, the DNA molecule encodes a target protein or a fragment thereof. In embodiments, the DNA molecule of the synthesis module encodes an mRNA. In embodiments, the mRNA encodes a target protein or a fragment thereof. In embodiments, the mRNA does not include an mRNA splice site.

[0076] Some embodiments of a synthesis module include any one or all of the following:
[0077] a weak, ubiquitous promoter (e.g.-Ubc, PGK, EF1a-core);
   [0078] (In some embodiments, the promoter is strengthened via a SV40 intron)
[0079] An 5′ UTR and Kozak sequence;
   [0080] (In some embodiments, the vector lacks a 5′ UTR and/or uses a Kozak sequence (GCC (RCC) ATG, where R is any nucleotide and ATG is the start codon))
[0081] A full-length coding sequence of a target; and
[0082] An engineered 3′ UTR consisting of multiple fragments of the 3′ UTR and the distal polyA signal
   [0083] (In some embodiments, the vector lacks this element and only contains a polyA signal (e.g.-bGH, SV40, hGH)).

[0084] In some embodiments, the synthesis module increases a target measurement (e.g. protein or RNA, such as a MECP2 protein or RNA) in a cell or population of cells by at least 5%, at least 10%, at least 15%, at least 20%, at least 25%, at least 30%, at least 35%, at least 40%, at least 45%, at least 50%, at least 55%, at least 60%, at least 65%, at least 70%, at least 75%, at least 80%, at least 90%, at least 100%, at least 110%, at least 120%, at least 130%, at least 140%, at least 150%, at least 160%, at least 170%, at least 180%, at least 190%, at least 200%, at least 210%, at least 220%, at least 230%, at least 240%, or at least 250%, relative to a baseline target measurement. In some embodiments, the synthesis module increases a target measurement (e.g. protein or RNA, such as a MECP2 protein or RNA) in a cell or population of cells by less than 5%, less than 10%, less than 15%, less than 20%, less than 25%, less than 30%, less than 35%, less than 40%, less than 45%, less than 50%, less than 55%, less than 60%, less than 65%, less than 70%, less than 75%, less than 80%, less than 90%, less than 100%, less than 110%, less than 120%, less than 130%, less than 140%, less than 150%, less than 160%, less than 170%, less than 180%, less than 190%, less than 200%, less than 210%, less than 220%, less than 230%, less than 240%, or less than 250%, relative to a baseline target measurement.

### Synthesis Module Promoter

[0085] For the system provided herein, in embodiments, the synthesis module further includes a synthesis module promoter sequence, or is encoded by a nucleic acid including the synthesis module promoter sequence. In embodiments, the synthesis module includes a synthesis module promoter sequence. In embodiments, the synthesis module is encoded by a nucleic acid including the synthesis module promoter sequence. In embodiments, the mRNA of the synthesis module excludes an mRNA splice site.

[0086] In embodiments, the synthesis module promoter sequence includes a mouse or human promoter sequence. In embodiments, the synthesis module promoter sequence includes a mouse promoter sequence. In embodiments, the synthesis module promoter sequence includes a human promoter sequence.

[0087] In embodiments, the synthesis module promoter includes a ubiquitous promoter. The term “ubiquitous promoter” refers to a promoter that is active in a wide range cellular conditions. For example, a ubiquitous promoter may allow continuous expression of a gene in a cell. In embodiments, a ubiquitous promoter allows expression of a gene in a variety of cells or in a multiple stages of the cell cycle. In embodiments, a ubiquitous promoter is active in a wide range of tissue types. In embodiments, the ubiquitous promoter allows for constitutive expression of the recombinant version of the target RNA. In embodiments, the recombinant version of the target RNA may be expressed in a wide range of cells. In embodiments, the recombinant version of the target RNA may be expressed during multiple phases of the cell cycle.

[0088] In embodiments, the synthesis module promoter includes a weak promoter. For example, a weak promoter may regulate transcription of a recombinant version of a target gene or RNA wherein the expression level of the recombinant version of the gene is no greater than the expression level of the endogenous gene in a healthy cell (e.g. a cell without a genetic disorder). In embodiments, the weak promoter drives expression of mRNA molecules at a rate no greater than does an endogenous target gene promoter.

[0089] In embodiments, the weak promoter drives expression of mRNA molecules at 10%, 20%, 30% 40%, 50%, 60%, 70%, 80%, 85%, 90%, 91%, 92%, 93%, 94%, 95%, 96%, 97%, 98%, 99%, or 100%, or a range thereof, of the rate as does an endogenous promoter. In embodiments, the endogenous promoter is a target gene promoter. In embodiments, the weak promoter drives expression of mRNA molecules at 10%, 20%, 30% 40%, 50%, 60%, 70%, 80%, 85%, 90%, 91%, 92%, 93%, 94%, 95%, 96%, 97%, 98%, 99%, 100%, 105%, 110%, 115%, 120%, 125%, 130%, 140%, or 150%, or a range thereof, of the rate as does an endogenous promoter. In embodiments, the endogenous promoter is a target gene promoter.

[0090] In embodiments, the weak promoter drives expression of mRNA molecules at less than 2-fold, 1.8-fold, 1.6-fold, 1.4-fold, 1.2-fold, 1-fold, 0.8-fold, 0.6-fold, 0.4-fold, or 0.2-fold of the rate as does an endogenous promoter. In embodiments, the endogenous promoter is an endogenous target gene promoter.

[0091] In embodiments, the synthesis module promoter sequence includes a promoter sequence of a Ubc promoter, a PGK promoter, or an EF1a-core promoter. In embodiments, the synthesis module promoter sequence includes a Ubc promoter sequence, a PGK promoter sequence, or an EF1a-core promoter sequence. In embodiments, the synthesis module promoter sequence includes a Ubc promoter sequence. In embodiments, the synthesis module promoter sequence includes a PGK promoter sequence. In embodiments, the synthesis module promoter sequence includes an EF1a-core promoter sequence. In embodiments, the synthesis module promoter sequence is a Ubc promoter sequence. In embodiments, the synthesis module promoter sequence is a PGK promoter sequence. In embodiments, the synthesis module promoter sequence is an EF1a-core promoter sequence.

[0092] In embodiments, the synthesis module promoter sequence is at least 90% identical to a promoter sequence set forth in Table 1. In embodiments, the synthesis module promoter sequence is at least 91% identical to a promoter sequence set forth in Table 1. In embodiments, the synthesis module promoter sequence is at least 92% identical to a promoter sequence set forth in Table 1. In embodiments, the synthesis module promoter sequence is at least 93% identical to a promoter sequence set forth in Table 1. In embodiments, the synthesis module promoter sequence is at least 94% identical to a promoter sequence set forth in Table 1. In embodiments, the synthesis module promoter sequence is at least 94% identical to a promoter sequence set forth in Table 1. In embodiments, the synthesis module promoter sequence is at least 96% identical to a promoter sequence set forth in Table 1. In embodiments, the synthesis module promoter sequence is at least 97% identical to a promoter sequence set forth in Table 1. In embodiments, the synthesis module promoter sequence is at least 98% identical to a promoter sequence set forth in Table 1. In embodiments, the synthesis module promoter sequence is at least 99% identical to a promoter sequence set forth in Table 1. In embodiments, the synthesis module promoter sequence includes a promoter sequence set forth in Table 1. In embodiments, the synthesis module promoter sequence is a promoter sequence set forth in Table 1.

[0093] In embodiments, the synthesis promoter sequence is at least 90% identical to SEQ ID NO: 1, SEQ ID NO: 2, SEQ ID NO: 3, SEQ ID NO: 19, SEQ ID NO: 20, SEQ ID NO: 21, or SEQ ID NO: 22. In embodiments, the synthesis promoter sequence is at least 90% identical to SEQ ID NO: 1. In embodiments, the synthesis promoter sequence is at least 90% identical to SEQ ID NO: 2. In embodiments, the synthesis promoter sequence is at least 90% identical to SEQ ID NO: 3. In embodiments, the synthesis promoter sequence is at least 90% identical to SEQ ID NO: 19. In embodiments, the synthesis promoter sequence is at least 90% identical to SEQ ID NO: 20. In embodiments, the synthesis promoter sequence is at least 90% identical to SEQ ID NO: 21. In embodiments, the synthesis promoter sequence is at least 90% identical to SEQ ID NO: 22. In embodiments, the synthesis promoter sequence includes SEQ ID NO: 1. In embodiments, the synthesis promoter sequence includes SEQ ID NO: 2. In embodiments, the synthesis promoter sequence includes SEQ ID NO: 3. In embodiments, the synthesis promoter sequence includes SEQ ID NO: 19. In embodiments, the synthesis promoter sequence includes SEQ ID NO: 20. In embodiments, the synthesis promoter sequence includes SEQ ID NO: 21. In embodiments, the synthesis promoter sequence includes SEQ ID NO: 22.

[0094] In embodiments, the synthesis module promoter sequence is 5′ or upstream relative to the nucleic acid coding sequence (CDS). In embodiments, the synthesis module promoter sequence is 5′ relative to the nucleic acid coding sequence (CDS). In embodiments, the synthesis module promoter sequence is upstream relative to the nucleic acid coding sequence (CDS). In embodiments, the CDS encodes a target protein or a fragment thereof.

[0095] Some include a weak, ubiquitous promoter (e.g.-Ubc, PGK, EF1a-core). In some embodiments, the promoter is strengthened via a SV40 intron.

### SV40 INTRON

[0096] The synthesis module provided herein including embodiments thereof may further include one or more nucleic acid sequences that increases or upregulates expression levels of a recombinant gene (e.g. recombinant version of the target RNA). In embodiments, the synthesis module includes a nucleic acid sequence that increases the stability of the recombinant gene (e.g. recombinant version of the target RNA). In embodiments, the synthesis module includes a nucleic acid sequence that regulates processing of the recombinant gene (e.g. recombinant version of the target RNA).

[0097] In embodiments, the synthesis module further includes an SV40 intron sequence. In embodiments, the SV40 intron sequence is at least 90% identical to an SV40 intron sequence set forth in Table 1. In embodiments, the SV40 intron sequence is at least 91% identical to an SV40 intron sequence set forth in Table 1. In embodiments, the SV40 intron sequence is at least 92% identical to an SV40 intron sequence set forth in Table 1. In embodiments, the SV40 intron sequence is at least 93% identical to an SV40 intron sequence set forth in Table 1. In embodiments, the SV40 intron sequence is at least 94% identical to an SV40 intron sequence set forth in Table 1. In embodiments, the SV40 intron sequence is at least 95% identical to an SV40 intron sequence set forth in Table 1. In embodiments, the SV40 intron sequence is at least 96% identical to an SV40 intron sequence set forth in Table 1. In embodiments, the SV40 intron sequence is at least 97% identical to an SV40 intron sequence set forth in Table 1. In embodiments, the SV40 intron sequence is at least 98% identical to an SV40 intron sequence set forth in Table 1. In embodiments, the SV40 intron sequence is at least 99% identical to an SV40 intron sequence set forth in Table 1. In embodiments, the SV40 intron sequence includes an SV40 intron sequence set forth in Table 1. In embodiments, the SV40 intron sequence is an SV40 intron sequence set forth in Table 1.

[0098] In embodiments, the SV40 intron sequence is at least 80% identical to SEQ ID NO: 4. In embodiments, the SV40 intron sequence is at least 85% identical to SEQ ID NO: 4. In embodiments, the SV40 intron sequence is at least 90% identical to SEQ ID NO: 4. In embodiments, the SV40 intron sequence is at least 91% identical to SEQ ID NO: 4. In embodiments, the SV40 intron sequence is at least 92% identical to SEQ ID NO: 4. In embodiments, the SV40 intron sequence is at least 93% identical to SEQ ID NO: 4. In embodiments, the SV40 intron sequence is at least 94% identical to SEQ ID NO: 4. In embodiments, the SV40 intron sequence is at least 95% identical to SEQ ID NO: 4. In embodiments, the SV40 intron sequence is at least 96% identical to SEQ ID NO: 4. In embodiments, the SV40 intron sequence is at least 97% identical to SEQ ID NO: 4. In embodiments, the SV40 intron sequence is at least 98% identical to SEQ ID NO: 4. In embodiments, the SV40 intron sequence is at least 99% identical to SEQ ID NO: 4. In embodiments, the SV40 intron sequence includes SEQ ID NO: 4. In embodiments, the SV40 intron sequence is SEQ ID NO: 4.

[0099] In embodiments, the SV40 intron sequence is 3′ or downstream of the synthesis module promoter sequence. In embodiments, the SV40 intron sequence is 3′ of the synthesis module promoter sequence. In embodiments, the SV40 intron sequence is downstream of the synthesis module promoter sequence.

[0100] In embodiments, SV40 intron sequence is 5′ or upstream relative to the CDS. In embodiments, SV40 intron sequence is 5′ to the CDS. In embodiments, SV40 intron sequence is upstream relative to the CDS.

### 5′ Utr and Kozak Sequence

[0101] The system provided herein may in embodiments include one or more nucleic acid sequences capable of regulating expression of the target RNA (e.g. recombinant version of the target RNA). For example, the system module may include a sequence capable of regulating translation of the target RNA. Thus, in embodiments, the synthesis module further includes a 5′ untranslated region (UTR) sequence of the target RNA.

[0102] In embodiments, the 5′ UTR sequence is at least 90% identical to a 5′ UTR sequence set forth in Table 1. In embodiments, the 5′ UTR sequence is at least 91% identical to a 5′ UTR sequence set forth in Table 1. In embodiments, the 5′ UTR sequence is at least 92% identical to a 5′ UTR sequence set forth in Table 1. In embodiments, the 5′ UTR sequence is at least 93% identical to a 5′ UTR sequence set forth in Table 1. In embodiments, the 5′ UTR sequence is at least 94% identical to a 5′ UTR sequence set forth in Table 1. In embodiments, the 5′ UTR sequence is at least 95% identical to a 5′ UTR sequence set forth in Table 1. In embodiments, the 5′ UTR sequence is at least 96% identical to a 5′ UTR sequence set forth in Table 1. In embodiments, the 5′ UTR sequence is at least 97% identical to a 5′ UTR sequence set forth in Table 1. In embodiments, the 5′ UTR sequence is at least 98% identical to a 5′ UTR sequence set forth in Table 1. In embodiments, the 5′ UTR sequence is at least 99% identical to a 5′ UTR sequence set forth in Table 1. In embodiments, the 5′ UTR sequence includes a 5′ UTR sequence set forth in Table 1. In embodiments, the 5′ UTR sequence is a 5′ UTR sequence set forth in Table 1.

[0103] In embodiments, the synthesis module further includes a Kozak sequence. In embodiments, the Kozak sequence is at least 90% identical to 5′-GCCNCCATG-3′ where N is A, T, C, or G, and ATG is a start codon; or wherein the Kozak sequence is at least 90% identical to 5′-GCCNCCAUG-3′ where N is A, U, C, or G, and AUG is a start codon. In embodiments, the Kozak sequence is at least 90% identical to 5′-GCCNCCATG-3′ where N is A, T, C, or G, and ATG is a start codon. In embodiments, the Kozak sequence is at least 90% identical to 5′-GCCNCCAUG-3′ where N is A, U, C, or G, and AUG is a start codon. In embodiments, the Kozak sequence is an endogenous Kozak sequence. For example, the Kozak sequence may be a naturally-occuring Kozak sequence found in the endogenous gene encoding a target protein. In embodiments, the Kozak sequence is at least 90% identical to 5′-CGGAAAATG-3′. “Kozak sequence” as used herein refers to a nucleic acid sequence in mRNA that directs proteins involved in translation to the translation initiation site. For example, the Kozak sequence may direct the pre-initiation complex and ribosome to the translation initiation site. In embodiments, the Kozak sequence is involved in ribosome assembly.

[0104] In embodiments, the 5′ UTR sequence or the Kozak sequence is upstream or 5′ relative to the CDS within the synthesis module. In embodiments, the 5′ UTR sequence is upstream or 5′ relative to the CDS within the synthesis module. In embodiments, the 5′ UTR sequence is upstream relative to the CDS within the synthesis module. In embodiments, the 5′ UTR sequence is 5′ relative to the CDS within the synthesis module. In embodiments, the Kozak sequence is upstream or 5′ relative to the CDS within the synthesis module. In embodiments, the Kozak sequence is upstream relative to the CDS within the synthesis module. In embodiments, the Kozak sequence is 5′ relative to the CDS within the synthesis module.

[0105] Some embodiments include an endogenous target 5′ UTR (e.g. endogenous 5′ UTR such as an MECP2 5′ UTR) and Kozak sequence. In some embodiments, the vector lacks the 5′ UTR and/or uses a Kozak sequence (GCC (RCC) ATG, where R is any nucleotide and ATG is the start codon).

### Nucleic Acid Coding Sequence

[0106] Disclosed herein, in some embodiments, are synthesis modules that include a nucleic acid coding sequence (CDS). The CDS may be a CDS of a target such as a target mRNA. A nucleic acid coding sequence may include or exclude introns. For the system provided herein, in embodiments, the nucleic acid coding sequence (CDS) includes introns and exons. In embodiments, the CDS includes exons interspaced with an intron. In embodiments, the CDS includes exons without introns. Some embodiments include or encode an open reading frame (ORF) of a target mRNA such as an MECP2 mRNA.

[0107] In some embodiments, the CDS excludes 1 or more exons or introns of a target gene. In embodiments, the CDS does not include introns. Thus, in embodiments, the CDS includes exons adjacent to one another without an intervening intron.

[0108] An example of a CDS is a CDS encoding a target protein (e.g. MECP2). In embodiments, the CDS includes exons 1, 3 and 4 of MECP2. In embodiments, the CDS excludes exon 2 of MECP2. In embodiments, the CDS encodes an e1 isoform of MECP2. In embodiments, the e1 isoform of MECP2 includes exons 1, 3, and 4 of MECP2 or fragments thereof. In embodiments, the e1 isoform of MECP2 does not include exon 2 of MECP2. A similar strategy may be used for a different target.

[0109] In some embodiments, the CDS includes exon 1 of MECP2. An example of an MECP2 exon 1 sequence is included as SEQ ID NO: 924. The sequence of SEQ ID NO: 924 is a mouse version of exon 1 of MECP2. An exon of a target may include a sequence at least 80%, at least 85%, at least 90%, at least 95%, at least 98%, at least 99%, or 100% identical to SEQ ID NO: 924. An example of an MECP2 exon 1 sequence is included as SEQ ID NO: 927. The sequence of SEQ ID NO: 927 is a human version of exon 1 of MECP2. An exon of a target may include a sequence at least 80%, at least 85%, at least 90%, at least 95%, at least 98%, at least 99%, or 100% identical to SEQ ID NO: 927.

[0110] In some embodiments, the CDS includes exon 3 of MECP2. An example of an MECP2 exon 3 sequence is included as SEQ ID NO: 925. The sequence of SEQ ID NO: 925 is a mouse version of exon 3 of MECP2. An exon of a target may include a sequence at least 80%, at least 85%, at least 90%, at least 95%, at least 98%, at least 99%, or 100% identical to SEQ ID NO: 925. An example of an MECP2 exon 3 sequence is included as SEQ ID NO: 928. The sequence of SEQ ID NO: 928 is a human version of exon 3 of MECP2. An exon of a target may include a sequence at least 80%, at least 85%, at least 90%, at least 95%, at least 98%, at least 99%, or 100% identical to SEQ ID NO: 928.

[0111] In some embodiments, the CDS includes exon 4 of MECP2. An example of an MECP2 exon 4 sequence is included as SEQ ID NO: 926. The sequence of SEQ ID NO: 926 is a mouse version of exon 4 of MECP2. An exon of a target may include a sequence at least 80%, at least 85%, at least 90%, at least 95%, at least 98%, at least 99%, or 100% identical to SEQ ID NO: 926. An example of an MECP2 exon 4 sequence is included as SEQ ID NO: 929. The sequence of SEQ ID NO: 929 is a human version of exon 4 of MECP2. An exon of a target may include a sequence at least 80%, at least 85%, at least 90%, at least 95%, at least 98%, at least 99%, or 100% identical to SEQ ID NO: 929.

[0112] In embodiments, the CDS sequence is at least 90% identical to a CDS sequence set forth in Table 1. In embodiments, the CDS sequence is at least 91% identical to a CDS sequence set forth in Table 1. In embodiments, the CDS sequence is at least 92% identical to a CDS sequence set forth in Table 1. In embodiments, the CDS sequence is at least 93% identical to a CDS sequence set forth in Table 1. In embodiments, the CDS sequence is at least 94% identical to a CDS sequence set forth in Table 1. In embodiments, the CDS sequence is at least 95% identical to a CDS sequence set forth in Table 1. In embodiments, the CDS sequence is at least 96% identical to a CDS sequence set forth in Table 1. In embodiments, the CDS sequence is at least 97% identical to a CDS sequence set forth in Table 1. In embodiments, the CDS sequence is at least 98% identical to a CDS sequence set forth in Table 1. In embodiments, the CDS sequence is at least 99% identical to a CDS sequence set forth in Table 1. In embodiments, the CDS sequence includes a CDS sequence set forth in Table 1. In embodiments, the CDS sequence is a CDS sequence set forth in Table 1.

[0113] In embodiments, the CDS sequence is at least 90% identical to SEQ ID NO: 6. In embodiments, the CDS sequence is at least 91% identical to SEQ ID NO: 6. In embodiments, the CDS sequence is at least 92% identical to SEQ ID NO: 6. In embodiments, the CDS sequence is at least 93% identical to SEQ ID NO: 6. In embodiments, the CDS sequence is at least 94% identical to SEQ ID NO: 6. In embodiments, the CDS sequence is at least 95% identical to SEQ ID NO: 6. In embodiments, the CDS sequence is at least 96% identical to SEQ ID NO: 6. In embodiments, the CDS sequence is at least 97% identical to SEQ ID NO: 6. In embodiments, the CDS sequence is at least 98% identical to SEQ ID NO: 6. In embodiments, the CDS sequence is at least 99% identical to SEQ ID NO: 6. In embodiments, the CDS sequence includes SEQ ID NO: 6. In embodiments, the CDS sequence is SEQ ID NO: 6.

[0114] In embodiments, the CDS sequence is at least 90% identical to SEQ ID NO: 7. In embodiments, the CDS sequence is at least 91% identical to SEQ ID NO: 7. In embodiments, the CDS sequence is at least 92% identical to SEQ ID NO: 7. In embodiments, the CDS sequence is at least 93% identical to SEQ ID NO: 7. In embodiments, the CDS sequence is at least 94% identical to SEQ ID NO: 7. In embodiments, the CDS sequence is at least 95% identical to SEQ ID NO: 7. In embodiments, the CDS sequence is at least 96% identical to SEQ ID NO: 7. In embodiments, the CDS sequence is at least 97% identical to SEQ ID NO: 7. In embodiments, the CDS sequence is at least 98% identical to SEQ ID NO: 7. In embodiments, the CDS sequence is at least 99% identical to SEQ ID NO: 7. In embodiments, the CDS sequence includes SEQ ID NO: 7. In embodiments, the CDS sequence is SEQ ID NO: 7.

[0115] In embodiments, the CDS includes exon 2 of MECP2. In embodiments, the CDS encodes an e2 isoform of MECP2. In embodiments, the CDS does not include exon 1 of MECP2.

[0116] In embodiments, the CDS includes exons 1 and 3 of MECP2 with an intron between exons 1 and 3. In embodiments, the CDS includes an intron fragment sequence between exon 1 and 3. In embodiments, the intron fragment sequence between exon 1 and 3 includes a MECP1 intron 1 fragment sequence.

[0117] In embodiments, the MECP1 intron 1 fragment sequence is at least 90% identical to an intron 1 fragment sequence set forth in Table 1. In embodiments, the MECP1 intron 1 fragment sequence is at least 91% identical to an intron 1 fragment sequence set forth in Table 1. In embodiments, the MECP1 intron 1 fragment sequence is at least 92% identical to an intron 1 fragment sequence set forth in Table 1. In embodiments, the MECP1 intron 1 fragment sequence is at least 93% identical to an intron 1 fragment sequence set forth in Table 1. In embodiments, the MECP1 intron 1 fragment sequence is at least 94% identical to an intron 1 fragment sequence set forth in Table 1. In embodiments, the MECP1 intron 1 fragment sequence is at least 95% identical to an intron 1 fragment sequence set forth in Table 1. In embodiments, the MECP1 intron 1 fragment sequence is at least 96% identical to an intron 1 fragment sequence set forth in Table 1. In embodiments, the MECP1 intron 1 fragment sequence is at least 97% identical to an intron 1 fragment sequence set forth in Table 1. In embodiments, the MECP1 intron 1 fragment sequence is at least 98% identical to an intron 1 fragment sequence set forth in Table 1. In embodiments, the MECP1 intron 1 fragment sequence is at least 99% identical to an intron 1 fragment sequence set forth in Table 1. In embodiments, the MECP1 intron 1 fragment sequence includes an intron 1 fragment sequence set forth in Table 1. In embodiments, the MECP1 intron 1 fragment sequence is an intron 1 fragment sequence set forth in Table 1.

[0118] In embodiments, the CDS includes exons 1 and 3 of MECP2 without an intron between exons 1 and 3. In embodiments, the CDS includes exons 3 and 4 of MECP2 with an intron between exons 3 and 4. In embodiments, the CDS includes an intron fragment sequence between exon 3 and 4. In embodiments, the intron fragment sequence between exon 3 and 4 includes a MECP1 intron 3 fragment sequence.

[0119] In embodiments, the MECP1 intron 3 fragment sequence is at least 90% identical to an intron 3 fragment sequence set forth in Table 1. In embodiments, the MECP1 intron 3 fragment sequence is at least 91% identical to an intron 3 fragment sequence set forth in Table 1. In embodiments, the MECP1 intron 3 fragment sequence is at least 92% identical to an intron 3 fragment sequence set forth in Table 1. In embodiments, the MECP1 intron 3 fragment sequence is at least 93% identical to an intron 3 fragment sequence set forth in Table 1. In embodiments, the MECP1 intron 3 fragment sequence is at least 94% identical to an intron 3 fragment sequence set forth in Table 1. In embodiments, the MECP1 intron 3 fragment sequence is at least 95% identical to an intron 3 fragment sequence set forth in Table 1. In embodiments, the MECP1 intron 3 fragment sequence is at least 96% identical to an intron 3 fragment sequence set forth in Table 1. In embodiments, the MECP1 intron 3 fragment sequence is at least 97% identical to an intron 3 fragment sequence set forth in Table 1. In embodiments, the MECP1 intron 3 fragment sequence is at least 98% identical to an intron 3 fragment sequence set forth in Table 1. In embodiments, the MECP1 intron 3 fragment sequence is at least 99% identical to an intron 3 fragment sequence set forth in Table 1. In embodiments, the MECP1 intron 3 fragment sequence includes an intron 3 fragment sequence set forth in Table 1. In embodiments, the MECP1 intron 3 fragment sequence is an intron 3 fragment sequence set forth in Table 1.

[0120] In embodiments, the intron fragment sequence includes a nucleic acid sequence at least 90% identical to SEQ ID NO: 8. In embodiments, the intron fragment sequence includes a nucleic acid sequence at least 91% identical to SEQ ID NO: 8. In embodiments, the intron fragment sequence includes a nucleic acid sequence at least 92% identical to SEQ ID NO: 8. In embodiments, the intron fragment sequence includes a nucleic acid sequence at least 93% identical to SEQ ID NO: 8. In embodiments, the intron fragment sequence includes a nucleic acid sequence at least 94% identical to SEQ ID NO: 8. In embodiments, the intron fragment sequence includes a nucleic acid sequence at least 95% identical to SEQ ID NO: 8. In embodiments, the intron fragment sequence includes a nucleic acid sequence at least 96% identical to SEQ ID NO: 8. In embodiments, the intron fragment sequence includes a nucleic acid sequence at least 97% identical to SEQ ID NO: 8. In embodiments, the intron fragment sequence includes a nucleic acid sequence at least 98% identical to SEQ ID NO: 8. In embodiments, the intron fragment sequence includes a nucleic acid sequence at least 99% identical to SEQ ID NO: 8. In embodiments, the intron fragment sequence includes SEQ ID NO: 8. In embodiments, the intron fragment sequence is SEQ ID NO: 8.

[0121] In embodiments, the intron fragment sequence includes a nucleic acid sequence at least 90% identical to SEQ ID NO: 9. In embodiments, the intron fragment sequence includes a nucleic acid sequence at least 91% identical to SEQ ID NO: 9. In embodiments, the intron fragment sequence includes a nucleic acid sequence at least 92% identical to SEQ ID NO: 9. In embodiments, the intron fragment sequence includes a nucleic acid sequence at least 93% identical to SEQ ID NO: 9. In embodiments, the intron fragment sequence includes a nucleic acid sequence at least 94% identical to SEQ ID NO: 9. In embodiments, the intron fragment sequence includes a nucleic acid sequence at least 95% identical to SEQ ID NO: 9. In embodiments, the intron fragment sequence includes a nucleic acid sequence at least 96% identical to SEQ ID NO: 9. In embodiments, the intron fragment sequence includes a nucleic acid sequence at least 97% identical to SEQ ID NO: 9. In embodiments, the intron fragment sequence includes a nucleic acid sequence at least 98% identical to SEQ ID NO: 9. In embodiments, the intron fragment sequence includes a nucleic acid sequence at least 99% identical to SEQ ID NO: 9. In embodiments, the intron fragment sequence includes SEQ ID NO: 9. In embodiments, the intron fragment sequence is SEQ ID NO: 9.

[0122] In embodiments, the intron fragment sequence includes a nucleic acid sequence at least 90% identical to SEQ ID NO: 10. In embodiments, the intron fragment sequence includes a nucleic acid sequence at least 91% identical to SEQ ID NO: 10. In embodiments, the intron fragment sequence includes a nucleic acid sequence at least 92% identical to SEQ ID NO: 10. In embodiments, the intron fragment sequence includes a nucleic acid sequence at least 93% identical to SEQ ID NO: 10. In embodiments, the intron fragment sequence includes a nucleic acid sequence at least 94% identical to SEQ ID NO: 10. In embodiments, the intron fragment sequence includes a nucleic acid sequence at least 95% identical to SEQ ID NO: 10. In embodiments, the intron fragment sequence includes a nucleic acid sequence at least 96% identical to SEQ ID NO: 10. In embodiments, the intron fragment sequence includes a nucleic acid sequence at least 97% identical to SEQ ID NO: 10. In embodiments, the intron fragment sequence includes a nucleic acid sequence at least 98% identical to SEQ ID NO: 10. In embodiments, the intron fragment sequence includes a nucleic acid sequence at least 99% identical to SEQ ID NO: 10. In embodiments, the intron fragment sequence includes SEQ ID NO: 10. In embodiments, the intron fragment sequence is SEQ ID NO: 10.

[0123] In embodiments, the intron fragment sequence includes a nucleic acid sequence at least 90% identical to SEQ ID NO: 11. In embodiments, the intron fragment sequence includes a nucleic acid sequence at least 91% identical to SEQ ID NO: 11. In embodiments, the intron fragment sequence includes a nucleic acid sequence at least 92% identical to SEQ ID NO: 11. In embodiments, the intron fragment sequence includes a nucleic acid sequence at least 93% identical to SEQ ID NO: 11. In embodiments, the intron fragment sequence includes a nucleic acid sequence at least 94% identical to SEQ ID NO: 11. In embodiments, the intron fragment sequence includes a nucleic acid sequence at least 95% identical to SEQ ID NO: 11. In embodiments, the intron fragment sequence includes a nucleic acid sequence at least 96% identical to SEQ ID NO: 11. In embodiments, the intron fragment sequence includes a nucleic acid sequence at least 97% identical to SEQ ID NO: 11. In embodiments, the intron fragment sequence includes a nucleic acid sequence at least 98% identical to SEQ ID NO: 11. In embodiments, the intron fragment sequence includes a nucleic acid sequence at least 99% identical to SEQ ID NO: 11. In embodiments, the intron fragment sequence includes SEQ ID NO: 11. In embodiments, the intron fragment sequence is SEQ ID NO: 11.

[0124] In embodiments, the intron fragment sequence includes a nucleic acid sequence at least 90% identical to SEQ ID NO: 12. In embodiments, the intron fragment sequence includes a nucleic acid sequence at least 91% identical to SEQ ID NO: 12. In embodiments, the intron fragment sequence includes a nucleic acid sequence at least 92% identical to SEQ ID NO: 12. In embodiments, the intron fragment sequence includes a nucleic acid sequence at least 93% identical to SEQ ID NO: 12. In embodiments, the intron fragment sequence includes a nucleic acid sequence at least 94% identical to SEQ ID NO: 12. In embodiments, the intron fragment sequence includes a nucleic acid sequence at least 95% identical to SEQ ID NO: 12. In embodiments, the intron fragment sequence includes a nucleic acid sequence at least 96% identical to SEQ ID NO: 12. In embodiments, the intron fragment sequence includes a nucleic acid sequence at least 97% identical to SEQ ID NO: 12. In embodiments, the intron fragment sequence includes a nucleic acid sequence at least 98% identical to SEQ ID NO: 12. In embodiments, the intron fragment sequence includes a nucleic acid sequence at least 99% identical to SEQ ID NO: 12. In embodiments, the intron fragment sequence includes SEQ ID NO: 12. In embodiments, the intron fragment sequence is SEQ ID NO: 12.

[0125] In embodiments, the intron fragment sequence includes a nucleic acid sequence at least 90% identical to SEQ ID NO: 13. In embodiments, the intron fragment sequence includes a nucleic acid sequence at least 91% identical to SEQ ID NO: 13. In embodiments, the intron fragment sequence includes a nucleic acid sequence at least 92% identical to SEQ ID NO: 13. In embodiments, the intron fragment sequence includes a nucleic acid sequence at least 93% identical to SEQ ID NO: 13. In embodiments, the intron fragment sequence includes a nucleic acid sequence at least 94% identical to SEQ ID NO: 13. In embodiments, the intron fragment sequence includes a nucleic acid sequence at least 95% identical to SEQ ID NO: 13. In embodiments, the intron fragment sequence includes a nucleic acid sequence at least 96% identical to SEQ ID NO: 13. In embodiments, the intron fragment sequence includes a nucleic acid sequence at least 97% identical to SEQ ID NO: 13. In embodiments, the intron fragment sequence includes a nucleic acid sequence at least 98% identical to SEQ ID NO: 13. In embodiments, the intron fragment sequence includes a nucleic acid sequence at least 99% identical to SEQ ID NO: 13. In embodiments, the intron fragment sequence includes SEQ ID NO: 13. In embodiments, the intron fragment sequence is SEQ ID NO: 13.

[0126] In embodiments, the intron fragment sequence includes a nucleic acid sequence at least 90% identical to SEQ ID NO: 14. In embodiments, the intron fragment sequence includes a nucleic acid sequence at least 91% identical to SEQ ID NO: 14. In embodiments, the intron fragment sequence includes a nucleic acid sequence at least 92% identical to SEQ ID NO: 14. In embodiments, the intron fragment sequence includes a nucleic acid sequence at least 93% identical to SEQ ID NO: 14. In embodiments, the intron fragment sequence includes a nucleic acid sequence at least 94% identical to SEQ ID NO: 14. In embodiments, the intron fragment sequence includes a nucleic acid sequence at least 95% identical to SEQ ID NO: 14. In embodiments, the intron fragment sequence includes a nucleic acid sequence at least 96% identical to SEQ ID NO: 14. In embodiments, the intron fragment sequence includes a nucleic acid sequence at least 97% identical to SEQ ID NO: 14. In embodiments, the intron fragment sequence includes a nucleic acid sequence at least 98% identical to SEQ ID NO: 14. In embodiments, the intron fragment sequence includes a nucleic acid sequence at least 99% identical to SEQ ID NO: 14. In embodiments, the intron fragment sequence includes SEQ ID NO: 14. In embodiments, the intron fragment sequence is SEQ ID NO: 14.

[0127] In embodiments, the intron fragment sequence includes a nucleic acid sequence at least 90% identical to SEQ ID NO: 15. In embodiments, the intron fragment sequence includes a nucleic acid sequence at least 91% identical to SEQ ID NO: 15. In embodiments, the intron fragment sequence includes a nucleic acid sequence at least 92% identical to SEQ ID NO: 15. In embodiments, the intron fragment sequence includes a nucleic acid sequence at least 93% identical to SEQ ID NO: 15. In embodiments, the intron fragment sequence includes a nucleic acid sequence at least 94% identical to SEQ ID NO: 15. In embodiments, the intron fragment sequence includes a nucleic acid sequence at least 95% identical to SEQ ID NO: 15. In embodiments, the intron fragment sequence includes a nucleic acid sequence at least 96% identical to SEQ ID NO: 15. In embodiments, the intron fragment sequence includes a nucleic acid sequence at least 97% identical to SEQ ID NO: 15. In embodiments, the intron fragment sequence includes a nucleic acid sequence at least 98% identical to SEQ ID NO: 15. In embodiments, the intron fragment sequence includes a nucleic acid sequence at least 99% identical to SEQ ID NO: 15. In embodiments, the intron fragment sequence includes SEQ ID NO: 15. In embodiments, the intron fragment sequence is SEQ ID NO: 15.

[0128] In embodiments, the CDS includes exons 3 and 4 of MECP2 without an intron between exons 3 and 4. Some embodiments include a full-length MECP2 coding sequence comprising exons 1, 3, and 4 of an MECP2 RNA. Some embodiments include a full-length MECP2 coding sequence consisting of exons 1, 3, and 4 of an MECP2 RNA. In some embodiments, this contains endogenous intron fragments between exons 1 and 3, or 3 and 4.

### 3′ UTR

[0129] The expression system provided herein in embodiments may include a sequence that regulates expression of the recombinant version of the target RNA. For example, the expression system may include a sequence that regulates expression of the nucleic acid coding sequence (CDS) encoding the recombinant version of the target protein. For example, the expression system may include a sequence that regulates translation or post-translational modifications of the CDS encoding the target protein (e.g. a recombinant version of the target protein). The expression sequence may include a sequence that regulates stability of the CDS encoding the target protein (e.g. a recombinant version of the target protein). Thus, in embodiments, the synthesis module further comprises a 3′ untranslated region (UTR) sequence of the target RNA. In embodiments, the 3′ UTR sequence includes an endogenous target RNA 3′ UTR sequence or fragment thereof. In embodiments, the 3′ UTR sequence includes an endogenous target RNA 3′ UTR sequence or fragment thereof.

[0130] In embodiments, the 3′ UTR includes multiple fragments of an endogenous target RNA 3′ UTR sequence. For example, the 3′ UTR may include multiple fragments of an endogenous target RNA 3′ UTR sequence, each including endogenous miRNA binding sites.

[0131] In embodiments, the 3′ UTR sequence is downstream or 3′ relative to the promoter sequence, the SV40 intron sequence, the 5′ UTR sequence, the Kozak sequence, or the CDS within the synthesis module. In embodiments, the 3′ UTR sequence is downstream or 3′ relative to the promoter sequence within the synthesis module. In embodiments, the 3′ UTR sequence is downstream or 3′ relative to the SV40 intron sequence within the synthesis module. In embodiments, the 3′ UTR sequence is downstream or 3′ relative to the 5′ UTR sequence within the synthesis module. In embodiments, the 3′ UTR sequence is downstream or 3′ relative to the Kozak sequence within the synthesis module. In embodiments, the 3′ UTR sequence is downstream or 3′ relative to the CDS within the synthesis module.

[0132] In embodiments, the synthesis module includes a polyA signal sequence. In embodiments, the 3′ UTR sequence includes the polyA signal sequence. In embodiments, the synthesis module further includes a sequence that regulates polyadenylation and/or termination of the target RNA. In embodiments, the polyA signal sequence includes a -bGH signal sequence, a SV40 signal sequence, or a hGH polyA signal sequence. In embodiments, the polyA signal sequence includes a -bGH signal sequence. In embodiments, the polyA signal sequence includes a SV40 signal sequence. In embodiments, the polyA signal sequence includes a hGH polyA signal sequence.

[0133] In embodiments, the 3′ UTR sequence or polyA signal sequence is at least 90% identical to a 3′ UTR or polyA sequence set forth in Table 1. In embodiments, the 3′ UTR sequence or polyA signal sequence is at least 91% identical to a 3′ UTR or polyA sequence set forth in Table 1. In embodiments, the 3′ UTR sequence or polyA signal sequence is at least 92% identical to a 3′ UTR or polyA sequence set forth in Table 1. In embodiments, the 3′ UTR sequence or polyA signal sequence is at least 93% identical to a 3′ UTR or polyA sequence set forth in Table 1. In embodiments, the 3′ UTR sequence or polyA signal sequence is at least 94% identical to a 3′ UTR or polyA sequence set forth in Table 1. In embodiments, the 3′ UTR sequence or polyA signal sequence is at least 95% identical to a 3′ UTR or polyA sequence set forth in Table 1. In embodiments, the 3′ UTR sequence or polyA signal sequence is at least 96% identical to a 3′ UTR or polyA sequence set forth in Table 1. In embodiments, the 3′ UTR sequence or polyA signal sequence is at least 97% identical to a 3′ UTR or polyA sequence set forth in Table 1. In embodiments, the 3′ UTR sequence or polyA signal sequence is at least 98% identical to a 3′ UTR or polyA sequence set forth in Table 1. In embodiments, the 3′ UTR sequence or polyA signal sequence is at least 99% identical to a 3′ UTR or polyA sequence set forth in Table 1. In embodiments, the 3′ UTR sequence or polyA signal sequence includes a 3′ UTR or polyA sequence set forth in Table 1. In embodiments, the 3′ UTR sequence or polyA signal sequence is a 3′ UTR or polyA sequence set forth in Table 1.

[0134] Some embodiments include an engineered 3′ UTR comprising multiple fragments of an endogenous 3′ UTR (e.g. endogenous target 3′ UTR such as a MECP2 3′ UTR). Some embodiments include a polyA signal (e.g. a distal target polyA signal or MECP2 polyA signal). Some embodiments include an engineered 3′ UTR consisting of multiple fragments of the endogenous target 3′ UTR and the distal target polyA signal. In some embodiments, the vector lacks this element and only contains a polyA signal (e.g.-bGH, SV40, hGH).

### Silencing Module

[0135] Some embodiments relate to a silencing module. The silencing module may include a system for reducing nucleic acid expression by modifying splicing of the nucleic acid, which may include: an engineered U7 snRNA comprising a antisense nucleic acid sequence that targets an alternatively spliced region of a target RNA such as an RNA encoding a MECP2 protein. In some embodiments, the engineered U7 snRNA further comprises an ESS nucleic acid sequence. In some embodiments, the engineered U7 snRNA does not comprise an ESS nucleic acid sequence.

[0136] Disclosed herein, in some embodiments, are recombinant small nuclear RNAs (snRNAs) or snRNA sequences. Disclosed herein, in some embodiments, are modified or recombinant U7 small nuclear RNAs (snRNAs) or modified or recombinant U7 snRNA sequences. A modified or recombinant U7 snRNA, or a modified or recombinant U7 snRNA sequence may be included as part of a system, or may be used in a method herein. Disclosed herein, in some embodiments, are systems that include a modified or recombinant U7 snRNA or that include a modified or recombinant U7 snRNA sequence. The modified or recombinant U7 snRNA may be or include an engineered U7 snRNA. Terms such as modified, recombinant, and engineered may be used interchangeably herein. The U7 snRNA sequence may be useful for modifying nucleic acid splicing. In some embodiments, the U7 snRNA sequence may include an exonic splicing silencer (ESS) nucleic acid sequence. Some embodiments do not include an ESS nucleic acid sequence. In some embodiments, the U7 snRNA sequence may include a antisense nucleic acid sequence that targets an alternatively spliced region of a ribonucleic acid (RNA). In some embodiments, the targeted RNA may encode a target protein (e.g. MECP2 protein). The U7 snRNA sequence may include a smOPT sequence. The U7 snRNA sequence may include a hairpin.

[0137] Described herein, in some embodiments, are methods or systems that affect splicing of a target RNA such as an MECP2 RNA. A target RNA may be referred to as a targeted RNA. A target RNA may include a targeted region. A targeted region may bind with or be bound by a antisense nucleic acid sequence. A targeted region may include an exon sequence. The targeted region may include an exon of an MECP2 mRNA. A targeted region may include a splice junction of an exon (e.g. an intron/exon junction). A targeted region may include a region near an exon such as an intron sequence. A targeted region may include an intron sequence. A targeted region may exclude an intron. A targeted region may exclude an exon sequence. A targeted region may include part of an intron sequence. A targeted region may include part of an exon sequence. A targeted region may exclude part of an intron sequence. A targeted region may exclude part of an exon sequence. A targeted region may encompass both a region near an exon and at least part of the exon.

[0138] A targeted region may include a sequence or region within an mRNA sequence of a NCBI Reference Sequence selected from the group consisting of: NM_001110792, NM_004992, NM_001316337, NM_001369391, and NM_001369392.

[0139] For the system provided herein, in embodiments, the silencing module includes an RNA molecule. In embodiments, the RNA molecule of the silencing module includes a modified U7 small nuclear RNA (snRNA). In embodiments, the modified U7 snRNA includes a U7 core sequence at least 90% identical to a U7 core sequence set forth in Table 1. In embodiments, the modified U7 snRNA includes a U7 core sequence at least 91% identical to a U7 core sequence set forth in Table 1. In embodiments, the modified U7 snRNA includes a U7 core sequence at least 92% identical to a U7 core sequence set forth in Table 1. In embodiments, the modified U7 snRNA includes a U7 core sequence at least 93% identical to a U7 core sequence set forth in Table 1. In embodiments, the modified U7 snRNA includes a U7 core sequence at least 94% identical to a U7 core sequence set forth in Table 1. In embodiments, the modified U7 snRNA includes a U7 core sequence at least 95% identical to a U7 core sequence set forth in Table 1. In embodiments, the modified U7 snRNA includes a U7 core sequence at least 96% identical to a U7 core sequence set forth in Table 1. In embodiments, the modified U7 snRNA includes a U7 core sequence at least 97% identical to a U7 core sequence set forth in Table 1. In embodiments, the modified U7 snRNA includes a U7 core sequence at least 98% identical to a U7 core sequence set forth in Table 1. In embodiments, the modified U7 snRNA includes a U7 core sequence at least 99% identical to a U7 core sequence set forth in Table 1. In embodiments, the modified U7 snRNA includes a U7 core sequence set forth in Table 1. In embodiments, the modified U7 snRNA is a U7 core sequence set forth in Table 1.

[0140] For the system provided herein, in embodiments, the silencing module includes a DNA molecule. In embodiments, the DNA molecule of the silencing module encodes a modified U7 snRNA. In embodiments, the DNA molecule of the silencing module includes a single silencing module. In embodiments, the DNA molecule of the silencing module includes an arrayed series of silencing modules. For example, the DNA molecule of the silencing module may include multiple silencing modules. In embodiments, the DNA molecule of the silencing module may include 1, 2, 3, 4, 5, 6, 8, 8, 9, or 10 silencing modules. In embodiments, the DNA molecule of the silencing module includes 4 silencing modules.

[0141] In embodiments, the silencing module includes an arrayed series of modified U7 snRNAs. In some embodiments, the array includes multiple U7 modules. Each module may include a target sequence. The target sequences of multiple modules may be the same. The target sequences of some modules may be different.

[0142] For the system provided herein, in embodiments, the silencing module includes an siRNA targeting an endogenous target RNA. Thus, in embodiments, the antisense nucleic acid sequence targeting an endogenous target RNA is an siRNA. In embodiments, the silencing module does not include a U7 snRNA or a modified U7 snRNA. A “siRNA,” “small interfering RNA,” “small RNA,” or “RNAi” as provided herein refers to a nucleic acid that forms a double stranded RNA, which double stranded RNA has the ability to reduce or inhibit expression of a gene or target gene (e.g. when expressed in the same cell as the gene or target gene). The complementary portions of the nucleic acid that hybridize to form the double stranded molecule typically have substantial or complete identity. In one embodiment, a siRNA or RNAi is a nucleic acid that has substantial or complete identity to a target gene and forms a double stranded siRNA. In embodiments, the siRNA inhibits gene expression by interacting with a complementary cellular mRNA thereby interfering with the expression of the complementary mRNA. Typically, the nucleic acid is at least about 15-50 nucleotides in length (e.g., each complementary sequence of the double stranded siRNA is 15-50 nucleotides in length, and the double stranded siRNA is about 15-50 base pairs in length). In other embodiments, the length is 20-30 base nucleotides, preferably about 20-25 or about 24-29 nucleotides in length, e.g., 20, 21, 22, 23, 24, 25, 26, 27, 28, 29, or 30 nucleotides in length.

[0143] Disclosed herein, in some embodiments, is a system for modifying nucleic acid splicing, comprising: an exonic splicing silencer (ESS) nucleic acid sequence; and a antisense nucleic acid sequence that targets a region of a ribonucleic acid (RNA) encoding a target RNA. The region of the target RNA may include an exon or a region near an exon.

[0144] A modified U7 snRNA may include, in the following order from 5′ to 3′: (1) an optional exonic splicing silencer, (2) a targeting sequence (e.g. an antisense sequence) complementary to a region of a target mRNA, (4) a smOPT sequence, and (5) a hairpin sequence.

[0145] In some embodiments, a modified U7 snRNA includes a U7 core sequence, or an aspect of a U7 core sequence. In some embodiments, a recombinant U7 snRNA includes a U7 core sequence, or an aspect of a U7 core sequence. An example of a U7 core sequence is included in Table 1. For the U7 core sequence shown in Table 1, an antisense sequence is in parentheses, a smOPT is in in upper case, and a hairpin is in brackets. The antisense sequence may be or include a targeting sequence herein.

[0146] Some embodiments of a silencing module include a U7 module to suppress splicing of endogenous target transcripts. In some embodiments, the U7 module contains or includes a single U7 expression cassette or an array. In some embodiments, the U7 module contains or includes a single U7 expression cassette. In some embodiments, the U7 module contains or includes an array of U7 expression cassettes. The U7 module may contain or include U7 regulatory sequences such as a promoter and a 3′ element. The U7 module may contain or include an altered regulatory sequence. The U7 module may contain or include an altered promoter from another small RNA or an engineered promoter sequence. The U7 module may contain or include an altered 3′ element from another small RNA or an engineered 3′ element.

[0147] In some embodiments, the silencing module reduces a target (e.g. protein or RNA, such as a MECP2 protein or RNA) measurement in a cell or population of cells by at least 5%, at least 10%, at least 15%, at least 20%, at least 25%, at least 30%, at least 35%, at least 40%, at least 45%, at least 50%, at least 55%, at least 60%, at least 65%, at least 70%, at least 75%, or at least 80%, relative to a baseline target measurement. In some embodiments, the silencing module reduces a target (e.g. protein or RNA, such as a MECP2 protein or RNA) measurement in a cell or population of cells by less than 5%, less than 10%, less than 15%, less than 20%, less than 25%, less than 30%, less than 35%, less than 40%, less than 45%, less than 50%, less than 55%, less than 60%, less than 65%, less than 70%, less than 75%, or less than 80%, relative to a baseline target measurement.

### Silencing Module Promoter

[0148] For the system provided herein, in embodiments, the silencing module further includes a silencing module promoter sequence, or the silencing module is encoded by a nucleic acid including the silencing module promoter sequence. In embodiments, the silencing module further includes a silencing module promoter sequence. In embodiments, the silencing module is encoded by a nucleic acid including the silencing module promoter sequence. A silencing module promoter may include or be a recombinant regulatory element herein that includes or is a promoter.

[0149] The promoter may be operably connected with an ESS sequence, a U7 targeting sequence, a Sm binding site, or a U7 3′ hairpin, or a combination thereof. For example, the promoter may be operably connected with an ESS sequence, a U7 targeting sequence, a Sm binding site, and a U7 3′ hairpin within an expression construct. In embodiments, the silencing module promoter sequence includes a human promoter sequence. In embodiments, the silencing module promoter sequence includes a mouse promoter sequence.

[0150] In some embodiments, the silencing module promoter includes a mouse U1 snRNA (“MmU1”) promoter, a mouse U2 snRNA (“MmU2”) promoter, a mouse U3 snRNA (“MmU3”) promoter, a mouse U4 snRNA (“MmU4”) promoter, a mouse U5 snRNA (“MmU5”) promoter, a mouse U6 snRNA (“MmU6”) promoter, a mouse U7 snRNA (“MmU7”) promoter, a mouse U11 snRNA (“MmU11”) promoter, a mouse U12 snRNA (“MmU12”) promoter, a mouse U7SK snRNA (“MmU7SK”) promoter, a human U1 snRNA (“HsU1”) promoter, a human U2 snRNA (“HsU2”) promoter, a human U3 snRNA (“HsU3”) promoter, a human U4 snRNA (“HsU4”) promoter, a human U5 snRNA (“HsU5”) promoter, a human U6 snRNA (“HsU6”) promoter, a human U7 snRNA (“HsU7”) promoter, a human U11 snRNA (“HsU11”) promoter, a human U12 snRNA (“HsU12”) promoter, a human U7SK snRNA (“HsU7SK”) promoter, or a functional combination of fragments thereof.

[0151] The silencing module promoter may include a MmU1 promoter. The silencing module promoter may include a MmU2 promoter. The silencing module promoter may include a MmU3 promoter. The silencing module promoter may include a MmU4 promoter. The silencing module promoter may include a MmU5 promoter. The silencing module promoter may include a MmU6 promoter. The silencing module promoter may include a MmU7 promoter. The silencing module promoter may include a MmU11 promoter. The silencing module promoter may include a MmU12 promoter. The silencing module promoter may include a MmU7SK promoter. The silencing module promoter may include a HsU1 promoter. The silencing module promoter may include a HsU2 promoter. The silencing module promoter may include a HsU3 promoter. The silencing module promoter may include a HsU4 promoter. The silencing module promoter may include a HsU5 promoter. The silencing module promoter may include a HsU6 promoter. The silencing module promoter may include a HsU7 promoter. The silencing module promoter may include a HsU11 promoter. The silencing module promoter may include a HsU12 promoter. The silencing module promoter may include a HsU7SK promoter.

[0152] The silencing module promoter may include a promoter fragment or a combination of promoter fragments. The silencing module promoter may include a MmU1 promoter fragment. The silencing module promoter fragment may include a MmU2 promoter fragment. The silencing module promoter fragment may include a MmU3 promoter fragment. The silencing module promoter fragment may include a MmU4 promoter fragment. The silencing module promoter fragment may include a MmU5 promoter fragment. The silencing module promoter fragment may include a MmU6 promoter fragment. The silencing module promoter fragment may include a MmU7 promoter fragment. The silencing module promoter fragment may include a MmU11 promoter fragment. The silencing module promoter fragment may include a MmU12 promoter fragment. The silencing module promoter fragment may include a MmU7SK promoter fragment. The silencing module promoter fragment may include a HsU1 promoter fragment. The silencing module promoter fragment may include a HsU2 promoter fragment. The silencing module promoter fragment may include a HsU3 promoter fragment. The silencing module promoter fragment may include a HsU4 promoter fragment. The silencing module promoter fragment may include a HsU5 promoter fragment. The silencing module promoter fragment may include a HsU6 promoter fragment. The silencing module promoter fragment may include a HsU7 promoter fragment. The silencing module promoter fragment may include a HsU11 promoter fragment. The silencing module promoter fragment may include a HsU12 promoter fragment. The silencing module promoter fragment may include a HsU7SK promoter fragment.

[0153] The silencing module promoter may include a proximal end of a promoter. The silencing module promoter proximal end may include a MmU1 promoter proximal end fragment. The silencing module promoter proximal end fragment may include a MmU2 promoter proximal end fragment. The silencing module promoter proximal end fragment may include a MmU3 promoter proximal end fragment. The silencing module promoter proximal end fragment may include a MmU4 promoter proximal end fragment. The silencing module promoter proximal end fragment may include a MmU5 promoter proximal end fragment. The silencing module promoter proximal end fragment may include a MmU6 promoter proximal end fragment. The silencing module promoter proximal end fragment may include a MmU7 promoter proximal end fragment. The silencing module promoter proximal end fragment may include a MmU11 promoter proximal end fragment. The silencing module promoter proximal end fragment may include a MmU12 promoter proximal end fragment. The silencing module promoter proximal end fragment may include a MmU7SK promoter proximal end fragment. The silencing module promoter proximal end fragment may include a HsU1 promoter proximal end fragment. The silencing module promoter proximal end fragment may include a HsU2 promoter proximal end fragment. The silencing module promoter proximal end fragment may include a HsU3 promoter proximal end fragment. The silencing module promoter proximal end fragment may include a HsU4 promoter proximal end fragment. The silencing module promoter proximal end fragment may include a HsU5 promoter proximal end fragment. The silencing module promoter proximal end fragment may include a HsU6 promoter proximal end fragment. The silencing module promoter proximal end fragment may include a HsU7 promoter proximal end fragment. The silencing module promoter proximal end fragment may include a HsU11 promoter proximal end fragment. The silencing module promoter proximal end fragment may include a HsU12 promoter proximal end fragment. The silencing module promoter proximal end fragment may include a HsU7SK promoter proximal end fragment.

[0154] The silencing module promoter may include a distal end of a promoter. The silencing module promoter distal end may include a MmU1 promoter distal end fragment. The silencing module promoter distal end fragment may include a MmU2 promoter distal end fragment. The silencing module promoter distal end fragment may include a MmU3 promoter distal end fragment. The silencing module promoter distal end fragment may include a MmU4 promoter distal end fragment. The silencing module promoter distal end fragment may include a MmU5 promoter distal end fragment. The silencing module promoter distal end fragment may include a MmU6 promoter distal end fragment. The silencing module promoter distal end fragment may include a MmU7 promoter distal end fragment. The silencing module promoter distal end fragment may include a MmU11 promoter distal end fragment. The silencing module promoter distal end fragment may include a MmU12 promoter distal end fragment. The silencing module promoter distal end fragment may include a MmU7SK promoter distal end fragment. The silencing module promoter distal end fragment may include a HsU1 promoter distal end fragment. The silencing module promoter distal end fragment may include a HsU2 promoter distal end fragment. The silencing module promoter distal end fragment may include a HsU3 promoter distal end fragment. The silencing module promoter distal end fragment may include a HsU4 promoter distal end fragment. The silencing module promoter distal end fragment may include a HsU5 promoter distal end fragment. The silencing module promoter distal end fragment may include a HsU6 promoter distal end fragment. The silencing module promoter distal end fragment may include a HsU7 promoter distal end fragment. The silencing module promoter distal end fragment may include a HsU11 promoter distal end fragment. The silencing module promoter distal end fragment may include a HsU12 promoter distal end fragment. The silencing module promoter distal end fragment may include a HsU7SK promoter distal end fragment.

[0155] In embodiments, the silencing module promoter includes a U7 snRNA promoter sequence. In embodiments, the silencing module promoter sequence includes a U1 snRNA promoter sequence. In embodiments, the silencing module promoter sequence includes a mouse U7 snRNA (“Mm U7”) promoter sequence, a human U7 snRNA (“Hs U7”) promoter sequence, a mouse U1a1 (“mulal” or “Mm U1a1”) promoter sequence, or a human U1-1 (“HU1” or “Hs U1-1”) promoter sequence, or a fragment or combination of fragments thereof. In embodiments, the silencing module promoter sequence includes a mouse U7 snRNA promoter sequence or a fragment thereof. In embodiments, the silencing module promoter sequence includes a human U7 snRNA promoter sequence or a fragment thereof. In embodiments, the silencing module promoter sequence includes a mouse U1a1 promoter sequence or a fragment thereof. In embodiments, the silencing module promoter sequence includes a human U1-1 promoter sequence or a fragment thereof.

[0156] In embodiments, the silencing module promoter sequence includes a U7 snRNA promoter sequence having a distal sequence element (DSE) replaced with a DSE of a U1-1 or U1a1 promoter sequence. In embodiments, the DSE is replaced with a DSE of a U1-1 promoter sequence. In embodiments, the DSE is replaced with a DSE of a U1a1 promoter sequence.

[0157] For the modified Mm U7 promoter of SEQ ID NO: 8, a U7 distal sequence element has been replaced with that of human U1-1 and a U7 proximal sequence element has been replaced with that of mouse U1a1. In embodiments, the silencing module promoter sequence includes a mouse U7 promoter sequence having a proximal sequence element (PSE) replaced with a PSE of a U1-1 or U1a1 promoter sequence. In embodiments, the PSE is replaced with a PSE of a U1-1 promoter sequence. In embodiments, the PSE is replaced with a PSE of a U1a1 promoter sequence.

[0158] In embodiments, the silencing module promoter sequence is at least 90% identical to a promoter sequence set forth in Table 8. In embodiments, the silencing module promoter sequence is at least 91% identical to a promoter sequence set forth in Table 8. In embodiments, the silencing module promoter sequence is at least 92% identical to a promoter sequence set forth in Table 8. In embodiments, the silencing module promoter sequence is at least 93% identical to a promoter sequence set forth in Table 8. In embodiments, the silencing module promoter sequence is at least 94% identical to a promoter sequence set forth in Table 8. In embodiments, the silencing module promoter sequence is at least 95% identical to a promoter sequence set forth in Table 8. In embodiments, the silencing module promoter sequence is at least 96% identical to a promoter sequence set forth in Table 8. In embodiments, the silencing module promoter sequence is at least 97% identical to a promoter sequence set forth in Table 8. In embodiments, the silencing module promoter sequence is at least 98% identical to a promoter sequence set forth in Table 8. In embodiments, the silencing module promoter sequence is at least 99% identical to a promoter sequence set forth in Table 8. In embodiments, the silencing module promoter sequence includes a promoter sequence set forth in Table 8. In embodiments, the silencing module promoter sequence is a promoter sequence set forth in Table 8.

[0159] In embodiments, the silencing module promoter sequence is 5′ or upstream relative to the ESS nucleic acid sequence or the antisense nucleic acid sequence.

[0160] In embodiments, the silencing module is operatively coupled to the silencing module promoter. In embodiments, the silencing module is operatively coupled to the synthesis module promoter. In embodiments, the synthesis module is operatively coupled to the synthesis module promoter. In embodiments, the synthesis module is operatively coupled to the silencing module promoter.

### Exonic Splicing Silencer

[0161] Described herein, in some embodiments, are exonic splicing silencer (ESS) sequences. An ESS may be or include a 10-20 nt sequence at a 5′ terminus of an snRNA (e.g. engineered snRNA) capable of enhancing splicing suppression. The ESS may be included in a modified or recombinant snRNA or U7 snRNA. The ESS may recruit a protein factor that reduces splicing of the RNA encoding a target protein (e.g. a MECP2 protein). An ESS sequence may refer to an ESS or to a sequence that encodes an ESS. An ESS may include a short region of an exon and is a cis-regulatory element (CREs). CREs are regions of non-coding DNA which regulate transcription of neighboring genes. CREs may include components of genetic regulatory networks that control the timing and the amount that a specific gene is expressed. An ESS may be bound by a negatively acting factor such as a heterogeneous ribonucleoprotein (hnRNP).

[0162] In embodiments, the ESS recruits a protein factor or group of factors that reduce or silence splicing of the endogenous target RNA. In embodiments, the ESS nucleic acid sequence includes a nucleic acid sequence at least 90% identical to ATGATAGGGACTTAGGGTGA (SEQ ID NO: 240), at least 90% identical to TTTGTTCCGTGGGTGGTTTA (SEQ ID NO: 241), or at least 90% identical to TGGGGGGAGGTAGGTAGGTA (SEQ ID NO: 242). In embodiments, the ESS nucleic acid sequence includes a nucleic acid sequence at least 90% identical to SEQ ID NO: 240. In embodiments, the ESS nucleic acid sequence includes a nucleic acid sequence at least 91% identical to SEQ ID NO: 240. In embodiments, the ESS nucleic acid sequence includes a nucleic acid sequence at least 92% identical to SEQ ID NO: 240. In embodiments, the ESS nucleic acid sequence includes a nucleic acid sequence at least 93% identical to SEQ ID NO: 240. In embodiments, the ESS nucleic acid sequence includes a nucleic acid sequence at least 94% identical to SEQ ID NO: 240. In embodiments, the ESS nucleic acid sequence includes a nucleic acid sequence at least 95% identical to SEQ ID NO: 240. In embodiments, the ESS nucleic acid sequence includes a nucleic acid sequence at least 96% identical to SEQ ID NO: 240. In embodiments, the ESS nucleic acid sequence includes a nucleic acid sequence at least 97% identical to SEQ ID NO: 240. In embodiments, the ESS nucleic acid sequence includes a nucleic acid sequence at least 98% identical to SEQ ID NO: 240. In embodiments, the ESS nucleic acid sequence includes a nucleic acid sequence at least 99% identical to SEQ ID NO: 240. In embodiments, the ESS nucleic acid sequence includes SEQ ID NO: 240. In embodiments, the ESS nucleic acid sequence is SEQ ID NO: 240.

[0163] In embodiments, the ESS nucleic acid sequence includes a nucleic acid sequence at least 90% identical to SEQ ID NO: 241. In embodiments, the ESS nucleic acid sequence includes a nucleic acid sequence at least 91% identical to SEQ ID NO: 241. In embodiments, the ESS nucleic acid sequence includes a nucleic acid sequence at least 92% identical to SEQ ID NO: 241. In embodiments, the ESS nucleic acid sequence includes a nucleic acid sequence at least 93% identical to SEQ ID NO: 241. In embodiments, the ESS nucleic acid sequence includes a nucleic acid sequence at least 94% identical to SEQ ID NO: 241. In embodiments, the ESS nucleic acid sequence includes a nucleic acid sequence at least 95% identical to SEQ ID NO: 241. In embodiments, the ESS nucleic acid sequence includes a nucleic acid sequence at least 96% identical to SEQ ID NO: 241. In embodiments, the ESS nucleic acid sequence includes a nucleic acid sequence at least 97% identical to SEQ ID NO: 241. In embodiments, the ESS nucleic acid sequence includes a nucleic acid sequence at least 98% identical to SEQ ID NO: 241. In embodiments, the ESS nucleic acid sequence includes a nucleic acid sequence at least 99% identical to SEQ ID NO: 241. In embodiments, the ESS nucleic acid sequence includes SEQ ID NO: 241. In embodiments, the ESS nucleic acid sequence is SEQ ID NO: 241.

[0164] In embodiments, the ESS nucleic acid sequence includes a nucleic acid sequence at least 90% identical to SEQ ID NO: 242. In embodiments, the ESS nucleic acid sequence includes a nucleic acid sequence at least 91% identical to SEQ ID NO: 242. In embodiments, the ESS nucleic acid sequence includes a nucleic acid sequence at least 92% identical to SEQ ID NO: 242. In embodiments, the ESS nucleic acid sequence includes a nucleic acid sequence at least 93% identical to SEQ ID NO: 242. In embodiments, the ESS nucleic acid sequence includes a nucleic acid sequence at least 94% identical to SEQ ID NO: 242. In embodiments, the ESS nucleic acid sequence includes a nucleic acid sequence at least 95% identical to SEQ ID NO: 242. In embodiments, the ESS nucleic acid sequence includes a nucleic acid sequence at least 96% identical to SEQ ID NO: 242. In embodiments, the ESS nucleic acid sequence includes a nucleic acid sequence at least 97% identical to SEQ ID NO: 242. In embodiments, the ESS nucleic acid sequence includes a nucleic acid sequence at least 98% identical to SEQ ID NO: 242. In embodiments, the ESS nucleic acid sequence includes a nucleic acid sequence at least 99% identical to SEQ ID NO: 242. In embodiments, the ESS nucleic acid sequence includes SEQ ID NO: 242. In embodiments, the ESS nucleic acid sequence is SEQ ID NO: 242.

### U7 Targeting Sequence

[0165] Described herein, in some embodiments, are targeting nucleic acid sequences such as snRNA targeting sequences or U7 targeting sequences. A targeting nucleic acid sequence may be or include an antisense nucleic acid sequence. A U7 targeting nucleic acid sequence may be or include a U7 antisense nucleic acid sequence. An snRNA targeting nucleic acid sequence may be or include a snRNA antisense nucleic acid sequence. Described herein, in some embodiments, are antisense nucleic acid sequences such as snRNA antisense sequences or U7 antisense sequences. An antisense sequence may be referred to as a targeting sequence. The antisense nucleic acid sequence may be included in a modified or recombinant snRNA or U7 snRNA. The antisense nucleic acid sequence may target (e.g. bind or be reverse complementary to) a target RNA such as an RNA encoding an MECP2 protein. The antisense nucleic acid sequence may bind to the target RNA. In some embodiments, an antisense nucleic acid sequence is encoded by a DNA sequence (e.g. a DNA expression construct).

[0166] For the system provided herein, in embodiments the antisense nucleic acid sequence targets a targeted region of the endogenous target RNA. In embodiments, the antisense nucleic acid sequence binds to the targeted region of the endogenous target RNA. In embodiments, the antisense nucleic acid sequence is fully reverse complementary or partially reverse complementary (e.g. at least 90% reverse complementary) to the targeted region. For example, in embodiments, the antisense nucleic acid is at least partially complementary to the targeted region of the endogenous target RNA.

[0167] In embodiments, the targeted region is within an intron of the endogenous target RNA. In embodiments, the endogenous target RNA is a target mRNA (e.g. a pre-mRNA). In embodiments, the targeted region is within an intron of the target mRNA. In embodiments, the targeted region is at least partially complementary to a splice site of the endogenous target RNA.

[0168] In embodiments, the intron includes a nucleic acid sequence at least 90% identical to SEQ ID NO: 8. In embodiments, the intron includes a nucleic acid sequence at least 91% identical to SEQ ID NO: 8. In embodiments, the intron includes a nucleic acid sequence at least 92% identical to SEQ ID NO: 8. In embodiments, the intron includes a nucleic acid sequence at least 93% identical to SEQ ID NO: 8. In embodiments, the intron includes a nucleic acid sequence at least 94% identical to SEQ ID NO: 8. In embodiments, the intron includes a nucleic acid sequence at least 95% identical to SEQ ID NO: 8. In embodiments, the intron includes a nucleic acid sequence at least 96% identical to SEQ ID NO: 8. In embodiments, the intron includes a nucleic acid sequence at least 97% identical to SEQ ID NO: 8. In embodiments, the intron includes a nucleic acid sequence at least 98% identical to SEQ ID NO: 8. In embodiments, the intron includes a nucleic acid sequence at least 99% identical to SEQ ID NO: 8. In embodiments, the intron includes SEQ ID NO: 8.

[0169] In embodiments, the intron includes a nucleic acid sequence at least 90% identical to SEQ ID NO: 9. In embodiments, the intron includes a nucleic acid sequence at least 91% identical to SEQ ID NO: 9. In embodiments, the intron includes a nucleic acid sequence at least 92% identical to SEQ ID NO: 9. In embodiments, the intron includes a nucleic acid sequence at least 93% identical to SEQ ID NO: 9. In embodiments, the intron includes a nucleic acid sequence at least 94% identical to SEQ ID NO: 9. In embodiments, the intron includes a nucleic acid sequence at least 95% identical to SEQ ID NO: 9. In embodiments, the intron includes a nucleic acid sequence at least 96% identical to SEQ ID NO: 9. In embodiments, the intron includes a nucleic acid sequence at least 97% identical to SEQ ID NO: 9. In embodiments, the intron includes a nucleic acid sequence at least 98% identical to SEQ ID NO: 9. In embodiments, the intron includes a nucleic acid sequence at least 99% identical to SEQ ID NO: 9. In embodiments, the intron includes SEQ ID NO: 9.

[0170] In embodiments, the intron includes a nucleic acid sequence at least 90% identical to SEQ ID NO: 10. In embodiments, the intron includes a nucleic acid sequence at least 91% identical to SEQ ID NO: 10. In embodiments, the intron includes a nucleic acid sequence at least 92% identical to SEQ ID NO: 10. In embodiments, the intron includes a nucleic acid sequence at least 93% identical to SEQ ID NO: 10. In embodiments, the intron includes a nucleic acid sequence at least 94% identical to SEQ ID NO: 10. In embodiments, the intron includes a nucleic acid sequence at least 95% identical to SEQ ID NO: 10. In embodiments, the intron includes a nucleic acid sequence at least 96% identical to SEQ ID NO: 10. In embodiments, the intron includes a nucleic acid sequence at least 97% identical to SEQ ID NO: 10. In embodiments, the intron includes a nucleic acid sequence at least 98% identical to SEQ ID NO: 10. In embodiments, the intron includes a nucleic acid sequence at least 99% identical to SEQ ID NO: 10. In embodiments, the intron includes SEQ ID NO: 10.

[0171] In embodiments, the intron includes a nucleic acid sequence at least 90% identical to SEQ ID NO: 11. In embodiments, the intron includes a nucleic acid sequence at least 91% identical to SEQ ID NO: 11. In embodiments, the intron includes a nucleic acid sequence at least 92% identical to SEQ ID NO: 11. In embodiments, the intron includes a nucleic acid sequence at least 93% identical to SEQ ID NO: 11. In embodiments, the intron includes a nucleic acid sequence at least 94% identical to SEQ ID NO: 11. In embodiments, the intron includes a nucleic acid sequence at least 95% identical to SEQ ID NO: 11. In embodiments, the intron includes a nucleic acid sequence at least 96% identical to SEQ ID NO: 11. In embodiments, the intron includes a nucleic acid sequence at least 97% identical to SEQ ID NO: 11. In embodiments, the intron includes a nucleic acid sequence at least 98% identical to SEQ ID NO: 11. In embodiments, the intron includes a nucleic acid sequence at least 99% identical to SEQ ID NO: 11. In embodiments, the intron includes SEQ ID NO: 11.

[0172] In embodiments, the intron includes a nucleic acid sequence at least 90% identical to SEQ ID NO: 12. In embodiments, the intron includes a nucleic acid sequence at least 91% identical to SEQ ID NO: 12. In embodiments, the intron includes a nucleic acid sequence at least 92% identical to SEQ ID NO: 12. In embodiments, the intron includes a nucleic acid sequence at least 93% identical to SEQ ID NO: 12. In embodiments, the intron includes a nucleic acid sequence at least 94% identical to SEQ ID NO: 12. In embodiments, the intron includes a nucleic acid sequence at least 95% identical to SEQ ID NO: 12. In embodiments, the intron includes a nucleic acid sequence at least 96% identical to SEQ ID NO: 12. In embodiments, the intron includes a nucleic acid sequence at least 97% identical to SEQ ID NO: 12. In embodiments, the intron includes a nucleic acid sequence at least 98% identical to SEQ ID NO: 12. In embodiments, the intron includes a nucleic acid sequence at least 99% identical to SEQ ID NO: 12. In embodiments, the intron includes SEQ ID NO: 12.

[0173] In embodiments, the intron includes a nucleic acid sequence at least 90% identical to SEQ ID NO: 13. In embodiments, the intron includes a nucleic acid sequence at least 91% identical to SEQ ID NO: 13. In embodiments, the intron includes a nucleic acid sequence at least 92% identical to SEQ ID NO: 13. In embodiments, the intron includes a nucleic acid sequence at least 93% identical to SEQ ID NO: 13. In embodiments, the intron includes a nucleic acid sequence at least 94% identical to SEQ ID NO: 13. In embodiments, the intron includes a nucleic acid sequence at least 95% identical to SEQ ID NO: 13. In embodiments, the intron includes a nucleic acid sequence at least 96% identical to SEQ ID NO: 13. In embodiments, the intron includes a nucleic acid sequence at least 97% identical to SEQ ID NO: 13. In embodiments, the intron includes a nucleic acid sequence at least 98% identical to SEQ ID NO: 13. In embodiments, the intron includes a nucleic acid sequence at least 99% identical to SEQ ID NO: 13. In embodiments, the intron includes SEQ ID NO: 13.

[0174] In embodiments, the intron includes a nucleic acid sequence at least 90% identical to SEQ ID NO: 14. In embodiments, the intron includes a nucleic acid sequence at least 91% identical to SEQ ID NO: 14. In embodiments, the intron includes a nucleic acid sequence at least 92% identical to SEQ ID NO: 14. In embodiments, the intron includes a nucleic acid sequence at least 93% identical to SEQ ID NO: 14. In embodiments, the intron includes a nucleic acid sequence at least 94% identical to SEQ ID NO: 14. In embodiments, the intron includes a nucleic acid sequence at least 95% identical to SEQ ID NO: 14. In embodiments, the intron includes a nucleic acid sequence at least 96% identical to SEQ ID NO: 14. In embodiments, the intron includes a nucleic acid sequence at least 97% identical to SEQ ID NO: 14. In embodiments, the intron includes a nucleic acid sequence at least 98% identical to SEQ ID NO: 14. In embodiments, the intron includes a nucleic acid sequence at least 99% identical to SEQ ID NO: 14. In embodiments, the intron includes SEQ ID NO: 14.

[0175] In embodiments, the intron includes a nucleic acid sequence at least 90% identical to SEQ ID NO: 15. In embodiments, the intron includes a nucleic acid sequence at least 91% identical to SEQ ID NO: 15. In embodiments, the intron includes a nucleic acid sequence at least 92% identical to SEQ ID NO: 15. In embodiments, the intron includes a nucleic acid sequence at least 93% identical to SEQ ID NO: 15. In embodiments, the intron includes a nucleic acid sequence at least 94% identical to SEQ ID NO: 15. In embodiments, the intron includes a nucleic acid sequence at least 95% identical to SEQ ID NO: 15. In embodiments, the intron includes a nucleic acid sequence at least 96% identical to SEQ ID NO: 15. In embodiments, the intron includes a nucleic acid sequence at least 97% identical to SEQ ID NO: 15. In embodiments, the intron includes a nucleic acid sequence at least 98% identical to SEQ ID NO: 15. In embodiments, the intron includes a nucleic acid sequence at least 99% identical to SEQ ID NO: 15. In embodiments, the intron includes SEQ ID NO: 15.

[0176] The antisense nucleic acid sequence may bind or target a target RNA. A target RNA (e.g. MECP2 RNA) may be or include a target mRNA (e.g. MECP2 mRNA). A target mRNA may be or include a target pre-mRNA (e.g. MECP2 pre-mRNA). For example, a target RNA may include a pre-mRNA. A pre-mRNA may include an mRNA before splicing, or before splicing is completed. Whan an mRNA has fully undergone splicing, it may be referred to as a mature mRNA.

[0177] In some embodiments, the target RNA (e.g. MECP2) RNA comprises a mammalian target RNA. In some embodiments, the target RNA comprises a primate target RNA. In some embodiments, the target RNA comprises a human target RNA. In some embodiments, the target RNA comprises a rodent or mouse target RNA.

[0178] A target RNA such as an MECP2 RNA may include a targeted region. In embodiments, the targeted region is within an exon of the endogenous target RNA. In embodiments, the targeted region is within an exon of a target mRNA. In embodiments, the antisense nucleic acid sequence targets an alternatively spliced exon of the endogenous target RNA.

[0179] In embodiments, the targeted region is within a 5′ half or 5′ end of an intron or exon of the endogenous target RNA. For example, in embodiments, the targeted region may be closer to the 5′ end of an intron of the endogenous target RNA. In embodiments, the targeted region includes the 5′ end of an intron of the endogenous target RNA. In embodiments, the targeted region may be closer to the 5′ end of an exon of the endogenous target RNA. In embodiments, the targeted region includes the 5′ end of an exon of the endogenous target RNA.

[0180] In embodiments, the targeted region is within a 3′ half or 3′ end of an intron or exon of the endogenous target RNA. For example, in embodiments, the targeted region may be closer to the 3′ end of an intron of the endogenous target RNA. In embodiments, the targeted region includes the 3′ end of an intron of the endogenous target RNA. In embodiments, the targeted region may be closer to the 3′ end of an exon of the endogenous target RNA. In embodiments, the targeted region includes the 3′ end of an exon of the endogenous target RNA.

[0181] In embodiments, the targeted region of the endogenous target RNA (e.g. MECP2 RNA) includes an intron-exon junction of the endogenous RNA. The intron-exon junction refers to the boundary between an intron and exon and includes the splice site that separates the intron and the exon upon pre-mRNA splicing.

[0182] In embodiments, the targeted region of the endogenous target RNA is within 0 nt and 150 nt of an intron-exon junction. In embodiments, the targeted region of the endogenous target RNA is within 10 nt and 150 nt of an intron-exon junction. In embodiments, the targeted region of the endogenous target RNA is within 20 nt and 150 nt of an intron-exon junction. In embodiments, the targeted region of the endogenous target RNA is within 30 nt and 150 nt of an intron-exon junction. In embodiments, the targeted region of the endogenous target RNA is within 40 nt and 150 nt of an intron-exon junction. In embodiments, the targeted region of the endogenous target RNA is within 40 nt and 150 nt of an intron-exon junction. In embodiments, the targeted region of the endogenous target RNA is within 60 nt and 150 nt of an intron-exon junction. In embodiments, the targeted region of the endogenous target RNA is within 70 nt and 150 nt of an intron-exon junction. In embodiments, the targeted region of the endogenous target RNA is within 80 nt and 150 nt of an intron-exon junction. In embodiments, the targeted region of the endogenous target RNA is within 90 nt and 150 nt of an intron-exon junction. In embodiments, the targeted region of the endogenous target RNA is within 100 nt and 150 nt of an intron-exon junction. In embodiments, the targeted region of the endogenous target RNA is within 110 nt and 150 nt of an intron-exon junction. In embodiments, the targeted region of the endogenous target RNA is within 120 nt and 150 nt of an intron-exon junction. In embodiments, the targeted region of the endogenous target RNA is within 130 nt and 150 nt of an intron-exon junction. In embodiments, the targeted region of the endogenous target RNA is within 140 nt and 150 nt of an intron-exon junction.

[0183] In embodiments, the targeted region of the endogenous target RNA is within 0 nt and 140 nt of an intron-exon junction. In embodiments, the targeted region of the endogenous target RNA is within 0 nt and 130 nt of an intron-exon junction. In embodiments, the targeted region of the endogenous target RNA is within 0 nt and 120 nt of an intron-exon junction. In embodiments, the targeted region of the endogenous target RNA is within 0 nt and 110 nt of an intron-exon junction. In embodiments, the targeted region of the endogenous target RNA is within 0 nt and 100 nt of an intron-exon junction. In embodiments, the targeted region of the endogenous target RNA is within 0 nt and 90 nt of an intron-exon junction. In embodiments, the targeted region of the endogenous target RNA is within 0 nt and 80 nt of an intron-exon junction. In embodiments, the targeted region of the endogenous target RNA is within 0 nt and 70 nt of an intron-exon junction. In embodiments, the targeted region of the endogenous target RNA is within 0 nt and 60 nt of an intron-exon junction. In embodiments, the targeted region of the endogenous target RNA is within 0 nt and 50 nt of an intron-exon junction. In embodiments, the targeted region of the endogenous target RNA is within 0 nt and 40 nt of an intron-exon junction. In embodiments, the targeted region of the endogenous target RNA is within 0 nt and 30 nt of an intron-exon junction. In embodiments, the targeted region of the endogenous target RNA is within 0 nt and 20 nt of an intron-exon junction.

[0184] In embodiments, the targeted region of the endogenous target RNA is within 0 nt, 10 nt, 20 nt, 30 nt, 40 nt, 50 nt, 60 nt, 70 nt, 80 nt, 90 nt, 100 nt, 110 nt, 120 nt, 130 nt, 140 nt, or 150 of an intron-exon junction. In embodiments, the targeted region of the endogenous target RNA includes an intro-exon junction.

[0185] A targeted region may be or comprise a length of nucleotides. For example, a targeted region may be about 10, about 15, about 20, about 25, about 30, about 35, about 40, about 45, about 50, about 60, about 70, about 80, about 90, about 100, about 110, about 120, about 130, about 140, or about 150 nucleotides in length, or a range of lengths defined by any 2 of the aforementioned lengths. In some embodiments, the length is at least 10 nucleotides. In some embodiments, the length is at least 15 nucleotides. In some embodiments, the length is at least 20 nucleotides. In some embodiments, the length is at least 25 nucleotides. In some embodiments, the length is at least 30 nucleotides. In some embodiments, the length is at least 35 nucleotides. In some embodiments, the length is at least 40 nucleotides. In some embodiments, the length is at least 45 nucleotides. In some embodiments, the length is at least 50 nucleotides. In some embodiments, the length is at least 60 nucleotides. In some embodiments, the length is at least 70 nucleotides. In some embodiments, the length is at least 80 nucleotides. In some embodiments, the length is at least 90 nucleotides. In some embodiments, the length is at least 100 nucleotides. In some embodiments, the length is at least 110 nucleotides. In some embodiments, the length is at least 120 nucleotides. In some embodiments, the length is at least 130 nucleotides. In some embodiments, the length is at least 140 nucleotides. In some embodiments, the length is at least 150 nucleotides. In some embodiments, the length is less than 15 nucleotides. In some embodiments, the length is less than 20 nucleotides. In some embodiments, the length is less than 25 nucleotides. In some embodiments, the length is less than 30 nucleotides. In some embodiments, the length is less than 35 nucleotides. In some embodiments, the length is less than 40 nucleotides. In some embodiments, the length is less than 45 nucleotides. In some embodiments, the length is less than 50 nucleotides. In some embodiments, the length is less than 60 nucleotides. In some embodiments, the length is less than 70 nucleotides. In some embodiments, the length is less than 80 nucleotides. In some embodiments, the length is less than 90 nucleotides. In some embodiments, the length is less than 100 nucleotides. In some embodiments, the length is less than 110 nucleotides. In some embodiments, the length is less than 120 nucleotides. In some embodiments, the length is less than 130 nucleotides. In some embodiments, the length is less than 140 nucleotides. In some embodiments, the length is less than 150 nucleotides.

[0186] In embodiments, the antisense nucleic acid sequence (antisense nucleic acid sequence targeting an endogenous target RNA) is 10-60 nucleotides in length. In embodiments, the antisense nucleic acid sequence is 15-60 nucleotides in length. In embodiments, the antisense nucleic acid sequence is 20-60 nucleotides in length. In embodiments, the antisense nucleic acid sequence is 25-60 nucleotides in length. In embodiments, the antisense nucleic acid sequence is 30-60 nucleotides in length. In embodiments, the antisense nucleic acid sequence is 35-60 nucleotides in length. In embodiments, the antisense nucleic acid sequence is 40-60 nucleotides in length. In embodiments, the antisense nucleic acid sequence is 45-60 nucleotides in length. In embodiments, the antisense nucleic acid sequence is 50-60 nucleotides in length. In embodiments, the antisense nucleic acid sequence is 55-60 nucleotides in length.

[0187] In embodiments, the antisense nucleic acid sequence is 10-55 nucleotides in length. In embodiments, the antisense nucleic acid sequence is 10-50 nucleotides in length. In embodiments, the antisense nucleic acid sequence is 10-45 nucleotides in length. In embodiments, the antisense nucleic acid sequence is 10-40 nucleotides in length. In embodiments, the antisense nucleic acid sequence is 10-35 nucleotides in length. In embodiments, the antisense nucleic acid sequence is 10-30 nucleotides in length. In embodiments, the antisense nucleic acid sequence is 10-25 nucleotides in length. In embodiments, the antisense nucleic acid sequence is 10-20 nucleotides in length. In embodiments, the antisense nucleic acid sequence is 10-15 nucleotides in length. In embodiments, the antisense nucleic acid sequence is about 10, 15, 20, 25, 30, 35, 40, 45, 50, 55, or 60 nucleotides in length, or a range defined by any two of the aforementioned numbers of nucleotides in length.

[0188] In some embodiments, the nucleic acid targeting sequence targets or binds exon 1 of MECP2. In some embodiments, the nucleic acid targeting sequence targets or binds SEQ ID NO: 924. In some embodiments, the nucleic acid targeting sequence targets or binds a sequence at least 80%, at least 85%, at least 90%, at least 95%, at least 98%, at least 99%, or 100% identical to SEQ ID NO: 924. In some embodiments, the nucleic acid targeting sequence targets or binds SEQ ID NO: 927. In some embodiments, the nucleic acid targeting sequence targets or binds a sequence at least 80%, at least 85%, at least 90%, at least 95%, at least 98%, at least 99%, or 100% identical to SEQ ID NO: 927.

[0189] In some embodiments, the nucleic acid targeting sequence targets or binds exon 3 of MECP2. In some embodiments, the nucleic acid targeting sequence targets or binds SEQ ID NO: 925. In some embodiments, the nucleic acid targeting sequence targets or binds a sequence at least 80%, at least 85%, at least 90%, at least 95%, at least 98%, at least 99%, or 100% identical to SEQ ID NO: 925. In some embodiments, the nucleic acid targeting sequence targets or binds SEQ ID NO: 928. In some embodiments, the nucleic acid targeting sequence targets or binds a sequence at least 80%, at least 85%, at least 90%, at least 95%, at least 98%, at least 99%, or 100% identical to SEQ ID NO: 928.

[0190] In some embodiments, the nucleic acid targeting sequence targets or binds exon 4 of MECP2. In some embodiments, the nucleic acid targeting sequence targets or binds SEQ ID NO: 926. In some embodiments, the nucleic acid targeting sequence targets or binds a sequence at least 80%, at least 85%, at least 90%, at least 95%, at least 98%, at least 99%, or 100% identical to SEQ ID NO: 926. In some embodiments, the nucleic acid targeting sequence targets or binds SEQ ID NO: 929. In some embodiments, the nucleic acid targeting sequence targets or binds a sequence at least 80%, at least 85%, at least 90%, at least 95%, at least 98%, at least 99%, or 100% identical to SEQ ID NO: 929.

[0191] In embodiments, the antisense nucleic acid sequence includes a nucleic acid sequence at least 90% identical to a antisense nucleic acid sequence set forth in Table 2. In embodiments, the antisense nucleic acid sequence includes a nucleic acid sequence at least 91% identical to a antisense nucleic acid sequence set forth in Table 2. In embodiments, the antisense nucleic acid sequence includes a nucleic acid sequence at least 92% identical to a antisense nucleic acid sequence set forth in Table 2. In embodiments, the antisense nucleic acid sequence includes a nucleic acid sequence at least 93% identical to a antisense nucleic acid sequence set forth in Table 2. In embodiments, the antisense nucleic acid sequence includes a nucleic acid sequence at least 94% identical to a antisense nucleic acid sequence set forth in Table 2. In embodiments, the antisense nucleic acid sequence includes a nucleic acid sequence at least 95% identical to a antisense nucleic acid sequence set forth in Table 2. In embodiments, the antisense nucleic acid sequence includes a nucleic acid sequence at least 96% identical to a antisense nucleic acid sequence set forth in Table 2. In embodiments, the antisense nucleic acid sequence includes a nucleic acid sequence at least 97% identical to a antisense nucleic acid sequence set forth in Table 2. In embodiments, the antisense nucleic acid sequence includes a nucleic acid sequence at least 98% identical to a antisense nucleic acid sequence set forth in Table 2. In embodiments, the antisense nucleic acid sequence includes a nucleic acid sequence at least 98% identical to a antisense nucleic acid sequence set forth in Table 2. In embodiments, the antisense nucleic acid sequence includes a antisense nucleic acid sequence set forth in Table 2. In embodiments, the antisense nucleic acid sequence is a antisense nucleic acid sequence set forth in Table 2.

[0192] In embodiments, the antisense nucleic acid sequence is at least 90% identical to SEQ ID NO: 30. In embodiments, the antisense nucleic acid sequence is at least 90% identical to SEQ ID NO: 31. In embodiments, the antisense nucleic acid sequence is at least 90% identical to SEQ ID NO: 32. In embodiments, the antisense nucleic acid sequence is at least 90% identical to SEQ ID NO: 33. In embodiments, the antisense nucleic acid sequence is at least 90% identical to SEQ ID NO: 34. In embodiments, the antisense nucleic acid sequence is at least 90% identical to SEQ ID NO: 35. In embodiments, the antisense nucleic acid sequence is at least 90% identical to SEQ ID NO: 36. In embodiments, the antisense nucleic acid sequence is at least 90% identical to SEQ ID NO: 37. In embodiments, the antisense nucleic acid sequence is at least 90% identical to SEQ ID NO: 38. In embodiments, the antisense nucleic acid sequence is at least 90% identical to SEQ ID NO: 39. In embodiments, the antisense nucleic acid sequence is at least 90% identical to SEQ ID NO: 40. In embodiments, the antisense nucleic acid sequence is at least 90% identical to SEQ ID NO: 41. In embodiments, the antisense nucleic acid sequence is at least 90% identical to SEQ ID NO: 42. In embodiments, the antisense nucleic acid sequence is at least 90% identical to SEQ ID NO: 43. In embodiments, the antisense nucleic acid sequence is at least 90% identical to SEQ ID NO: 44. In embodiments, the antisense nucleic acid sequence is at least 90% identical to SEQ ID NO: 45. In embodiments, the antisense nucleic acid sequence is at least 90% identical to SEQ ID NO: 46. In embodiments, the antisense nucleic acid sequence is at least 90% identical to SEQ ID NO: 47. In embodiments, the antisense nucleic acid sequence is at least 90% identical to SEQ ID NO: 48. In embodiments, the antisense nucleic acid sequence is at least 90% identical to SEQ ID NO: 49. In embodiments, the antisense nucleic acid sequence is at least 90% identical to SEQ ID NO: 50. In embodiments, the antisense nucleic acid sequence is at least 90% identical to SEQ ID NO: 51. In embodiments, the antisense nucleic acid sequence is at least 90% identical to SEQ ID NO: 52. In embodiments, the antisense nucleic acid sequence is at least 90% identical to SEQ ID NO: 53. In embodiments, the antisense nucleic acid sequence is at least 90% identical to SEQ ID NO: 54. In embodiments, the antisense nucleic acid sequence is at least 90% identical to SEQ ID NO: 55. In embodiments, the antisense nucleic acid sequence is at least 90% identical to SEQ ID NO: 56. In embodiments, the antisense nucleic acid sequence is at least 90% identical to SEQ ID NO: 57. In embodiments, the antisense nucleic acid sequence is at least 90% identical to SEQ ID NO: 58. In embodiments, the antisense nucleic acid sequence is at least 90% identical to SEQ ID NO: 59. In embodiments, the antisense nucleic acid sequence is at least 90% identical to SEQ ID NO: 60. In embodiments, the antisense nucleic acid sequence is at least 90% identical to SEQ ID NO: 61. In embodiments, the antisense nucleic acid sequence is at least 90% identical to SEQ ID NO: 62. In embodiments, the antisense nucleic acid sequence is at least 90% identical to SEQ ID NO: 63. In embodiments, the antisense nucleic acid sequence is at least 90% identical to SEQ ID NO: 64. In embodiments, the antisense nucleic acid sequence is at least 90% identical to SEQ ID NO: 65. In embodiments, the antisense nucleic acid sequence is at least 90% identical to SEQ ID NO: 66. In embodiments, the antisense nucleic acid sequence is at least 90% identical to SEQ ID NO: 67. In embodiments, the antisense nucleic acid sequence is at least 90% identical to SEQ ID NO: 68. In embodiments, the antisense nucleic acid sequence is at least 90% identical to SEQ ID NO: 69. In embodiments, the antisense nucleic acid sequence is at least 90% identical to SEQ ID NO: 70. In embodiments, the antisense nucleic acid sequence is at least 90% identical to SEQ ID NO: 71. In embodiments, the antisense nucleic acid sequence is at least 90% identical to SEQ ID NO: 72. In embodiments, the antisense nucleic acid sequence is at least 90% identical to SEQ ID NO: 73. In embodiments, the antisense nucleic acid sequence is at least 90% identical to SEQ ID NO: 74. In embodiments, the antisense nucleic acid sequence is at least 90% identical to SEQ ID NO: 75. In embodiments, the antisense nucleic acid sequence is at least 90% identical to SEQ ID NO: 76. In embodiments, the antisense nucleic acid sequence is at least 90% identical to SEQ ID NO: 76. In embodiments, the antisense nucleic acid sequence is at least 90% identical to SEQ ID NO: 77. In embodiments, the antisense nucleic acid sequence is at least 90% identical to SEQ ID NO: 78. In embodiments, the antisense nucleic acid sequence is at least 90% identical to SEQ ID NO: 79. In embodiments, the antisense nucleic acid sequence is at least 90% identical to SEQ ID NO: 80. In embodiments, the antisense nucleic acid sequence is at least 90% identical to SEQ ID NO: 81. In embodiments, the antisense nucleic acid sequence is at least 90% identical to SEQ ID NO: 82. In embodiments, the antisense nucleic acid sequence is at least 90% identical to SEQ ID NO: 83. In embodiments, the antisense nucleic acid sequence is at least 90% identical to SEQ ID NO: 84. In embodiments, the antisense nucleic acid sequence is at least 90% identical to SEQ ID NO: 84. In embodiments, the antisense nucleic acid sequence is at least 90% identical to SEQ ID NO: 85. In embodiments, the antisense nucleic acid sequence is at least 90% identical to SEQ ID NO: 86. In embodiments, the antisense nucleic acid sequence is at least 90% identical to SEQ ID NO: 87. In embodiments, the antisense nucleic acid sequence is at least 90% identical to SEQ ID NO: 88. In embodiments, the antisense nucleic acid sequence is at least 90% identical to SEQ ID NO: 89. In embodiments, the antisense nucleic acid sequence is at least 90% identical to SEQ ID NO: 90. In embodiments, the antisense nucleic acid sequence is at least 90% identical to SEQ ID NO: 91. In embodiments, the antisense nucleic acid sequence is at least 90% identical to SEQ ID NO: 92. In embodiments, the antisense nucleic acid sequence is at least 90% identical to SEQ ID NO: 93. In embodiments, the antisense nucleic acid sequence is at least 90% identical to SEQ ID NO: 94. In embodiments, the antisense nucleic acid sequence is at least 90% identical to SEQ ID NO: 95. In embodiments, the antisense nucleic acid sequence is at least 90% identical to SEQ ID NO: 96. In embodiments, the antisense nucleic acid sequence is at least 90% identical to SEQ ID NO: 97. In embodiments, the antisense nucleic acid sequence is at least 90% identical to SEQ ID NO: 98. In embodiments, the antisense nucleic acid sequence is at least 90% identical to SEQ ID NO: 99. In embodiments, the antisense nucleic acid sequence is at least 90% identical to SEQ ID NO: 100. In embodiments, the antisense nucleic acid sequence is at least 90% identical to SEQ ID NO: 101. In embodiments, the antisense nucleic acid sequence is at least 90% identical to SEQ ID NO: 102. In embodiments, the antisense nucleic acid sequence is at least 90% identical to SEQ ID NO: 103. In embodiments, the antisense nucleic acid sequence is at least 90% identical to SEQ ID NO: 104. In embodiments, the antisense nucleic acid sequence is at least 90% identical to SEQ ID NO: 105. In embodiments, the antisense nucleic acid sequence is at least 90% identical to SEQ ID NO: 106. In embodiments, the antisense nucleic acid sequence is at least 90% identical to SEQ ID NO: 107. In embodiments, the antisense nucleic acid sequence is at least 90% identical to SEQ ID NO: 108. In embodiments, the antisense nucleic acid sequence is at least 90% identical to SEQ ID NO: 109. In embodiments, the antisense nucleic acid sequence is at least 90% identical to SEQ ID NO: 110. In embodiments, the antisense nucleic acid sequence is at least 90% identical to SEQ ID NO: 111. In embodiments, the antisense nucleic acid sequence is at least 90% identical to SEQ ID NO: 112. In embodiments, the antisense nucleic acid sequence is at least 90% identical to SEQ ID NO: 113. In embodiments, the antisense nucleic acid sequence is at least 90% identical to SEQ ID NO: 114. In embodiments, the antisense nucleic acid sequence is at least 90% identical to SEQ ID NO: 115. In embodiments, the antisense nucleic acid sequence is at least 90% identical to SEQ ID NO: 116. In embodiments, the antisense nucleic acid sequence is at least 90% identical to SEQ ID NO: 117. In embodiments, the antisense nucleic acid sequence is at least 90% identical to SEQ ID NO: 118. In embodiments, the antisense nucleic acid sequence is at least 90% identical to SEQ ID NO: 119. In embodiments, the antisense nucleic acid sequence is at least 90% identical to SEQ ID NO: 120. In embodiments, the antisense nucleic acid sequence is at least 90% identical to SEQ ID NO: 121. In embodiments, the antisense nucleic acid sequence is at least 90% identical to SEQ ID NO: 126. In embodiments, the antisense nucleic acid sequence is at least 90% identical to SEQ ID NO: 127. In embodiments, the antisense nucleic acid sequence is at least 90% identical to SEQ ID NO: 128. In embodiments, the antisense nucleic acid sequence is at least 90% identical to SEQ ID NO: 129. In embodiments, the antisense nucleic acid sequence is at least 90% identical to SEQ ID NO: 130. In embodiments, the antisense nucleic acid sequence is at least 90% identical to SEQ ID NO: 131. In embodiments, the antisense nucleic acid sequence is at least 90% identical to SEQ ID NO: 132. In embodiments, the antisense nucleic acid sequence is at least 90% identical to SEQ ID NO: 133. In embodiments, the antisense nucleic acid sequence is at least 90% identical to SEQ ID NO: 134. In embodiments, the antisense nucleic acid sequence is at least 90% identical to SEQ ID NO: 135. In embodiments, the antisense nucleic acid sequence is at least 90% identical to SEQ ID NO: 136. In embodiments, the antisense nucleic acid sequence is at least 90% identical to SEQ ID NO: 137. In embodiments, the antisense nucleic acid sequence is at least 90% identical to SEQ ID NO: 138. In embodiments, the antisense nucleic acid sequence is at least 90% identical to SEQ ID NO: 139. In embodiments, the antisense nucleic acid sequence is at least 90% identical to SEQ ID NO: 140. In embodiments, the antisense nucleic acid sequence is at least 90% identical to SEQ ID NO: 141. In embodiments, the antisense nucleic acid sequence is at least 90% identical to SEQ ID NO: 142. In embodiments, the antisense nucleic acid sequence is at least 90% identical to SEQ ID NO: 143. In embodiments, the antisense nucleic acid sequence is at least 90% identical to SEQ ID NO: 144. In embodiments, the antisense nucleic acid sequence is at least 90% identical to SEQ ID NO: 145. In embodiments, the antisense nucleic acid sequence is at least 90% identical to SEQ ID NO: 146. In embodiments, the antisense nucleic acid sequence is at least 90% identical to SEQ ID NO: 147. In embodiments, the antisense nucleic acid sequence is at least 90% identical to SEQ ID NO: 148. In embodiments, the antisense nucleic acid sequence is at least 90% identical to SEQ ID NO: 149. In embodiments, the antisense nucleic acid sequence is at least 90% identical to SEQ ID NO: 150. In embodiments, the antisense nucleic acid sequence is at least 90% identical to SEQ ID NO: 151. In embodiments, the antisense nucleic acid sequence is at least 90% identical to SEQ ID NO: 152. In embodiments, the antisense nucleic acid sequence is at least 90% identical to SEQ ID NO: 153. In embodiments, the antisense nucleic acid sequence is at least 90% identical to SEQ ID NO: 154. In embodiments, the antisense nucleic acid sequence is at least 90% identical to SEQ ID NO: 155. In embodiments, the antisense nucleic acid sequence is at least 90% identical to SEQ ID NO: 156. In embodiments, the antisense nucleic acid sequence is at least 90% identical to SEQ ID NO: 157. In embodiments, the antisense nucleic acid sequence is at least 90% identical to SEQ ID NO: 158. In embodiments, the antisense nucleic acid sequence is at least 90% identical to SEQ ID NO: 159. In embodiments, the antisense nucleic acid sequence is at least 90% identical to SEQ ID NO: 160. In embodiments, the antisense nucleic acid sequence is at least 90% identical to SEQ ID NO: 161. In embodiments, the antisense nucleic acid sequence is at least 90% identical to SEQ ID NO: 162. In embodiments, the antisense nucleic acid sequence is at least 90% identical to SEQ ID NO: 163. In embodiments, the antisense nucleic acid sequence is at least 90% identical to SEQ ID NO: 164. In embodiments, the antisense nucleic acid sequence is at least 90% identical to SEQ ID NO: 165. In embodiments, the antisense nucleic acid sequence is at least 90% identical to SEQ ID NO: 166. In embodiments, the antisense nucleic acid sequence is at least 90% identical to SEQ ID NO: 167. In embodiments, the antisense nucleic acid sequence is at least 90% identical to SEQ ID NO: 168. In embodiments, the antisense nucleic acid sequence is at least 90% identical to SEQ ID NO: 169. In embodiments, the antisense nucleic acid sequence is at least 90% identical to SEQ ID NO: 170. In embodiments, the antisense nucleic acid sequence is at least 90% identical to SEQ ID NO: 171. In embodiments, the antisense nucleic acid sequence is at least 90% identical to SEQ ID NO: 172. In embodiments, the antisense nucleic acid sequence is at least 90% identical to SEQ ID NO: 173. In embodiments, the antisense nucleic acid sequence is at least 90% identical to SEQ ID NO: 174. In embodiments, the antisense nucleic acid sequence is at least 90% identical to SEQ ID NO: 175. In embodiments, the antisense nucleic acid sequence is at least 90% identical to SEQ ID NO: 176. In embodiments, the antisense nucleic acid sequence is at least 90% identical to SEQ ID NO: 176. In embodiments, the antisense nucleic acid sequence is at least 90% identical to SEQ ID NO: 177. In embodiments, the antisense nucleic acid sequence is at least 90% identical to SEQ ID NO: 178. In embodiments, the antisense nucleic acid sequence is at least 90% identical to SEQ ID NO: 179. In embodiments, the antisense nucleic acid sequence is at least 90% identical to SEQ ID NO: 180. In embodiments, the antisense nucleic acid sequence is at least 90% identical to SEQ ID NO: 181. In embodiments, the antisense nucleic acid sequence is at least 90% identical to SEQ ID NO: 182. In embodiments, the antisense nucleic acid sequence is at least 90% identical to SEQ ID NO: 183. In embodiments, the antisense nucleic acid sequence is at least 90% identical to SEQ ID NO: 184. In embodiments, the antisense nucleic acid sequence is at least 90% identical to SEQ ID NO: 184. In embodiments, the antisense nucleic acid sequence is at least 90% identical to SEQ ID NO: 185. In embodiments, the antisense nucleic acid sequence is at least 90% identical to SEQ ID NO: 186. In embodiments, the antisense nucleic acid sequence is at least 90% identical to SEQ ID NO: 187. In embodiments, the antisense nucleic acid sequence is at least 90% identical to SEQ ID NO: 188. In embodiments, the antisense nucleic acid sequence is at least 90% identical to SEQ ID NO: 189. In embodiments, the antisense nucleic acid sequence is at least 90% identical to SEQ ID NO: 190. In embodiments, the antisense nucleic acid sequence is at least 90% identical to SEQ ID NO: 191. In embodiments, the antisense nucleic acid sequence is at least 90% identical to SEQ ID NO: 192. In embodiments, the antisense nucleic acid sequence is at least 90% identical to SEQ ID NO: 193. In embodiments, the antisense nucleic acid sequence is at least 90% identical to SEQ ID NO: 194. In embodiments, the antisense nucleic acid sequence is at least 90% identical to SEQ ID NO: 195. In embodiments, the antisense nucleic acid sequence is at least 90% identical to SEQ ID NO: 196. In embodiments, the antisense nucleic acid sequence is at least 90% identical to SEQ ID NO: 197. In embodiments, the antisense nucleic acid sequence is at least 90% identical to SEQ ID NO: 198. In embodiments, the antisense nucleic acid sequence is at least 90% identical to SEQ ID NO: 199. In embodiments, the antisense nucleic acid sequence is at least 90% identical to SEQ ID NO: 200. In embodiments, the antisense nucleic acid sequence is at least 90% identical to SEQ ID NO: 201. In embodiments, the antisense nucleic acid sequence is at least 90% identical to SEQ ID NO: 202. In embodiments, the antisense nucleic acid sequence is at least 90% identical to SEQ ID NO: 203. In embodiments, the antisense nucleic acid sequence is at least 90% identical to SEQ ID NO: 204. In embodiments, the antisense nucleic acid sequence is at least 90% identical to SEQ ID NO: 205. In embodiments, the antisense nucleic acid sequence is at least 90% identical to SEQ ID NO: 206. In embodiments, the antisense nucleic acid sequence is at least 90% identical to SEQ ID NO: 207. In embodiments, the antisense nucleic acid sequence is at least 90% identical to SEQ ID NO: 208. In embodiments, the antisense nucleic acid sequence is at least 90% identical to SEQ ID NO: 209. In embodiments, the antisense nucleic acid sequence is at least 90% identical to SEQ ID NO: 210. In embodiments, the antisense nucleic acid sequence is at least 90% identical to SEQ ID NO: 211. In embodiments, the antisense nucleic acid sequence is at least 90% identical to SEQ ID NO: 212. In embodiments, the antisense nucleic acid sequence is at least 90% identical to SEQ ID NO: 213. In embodiments, the antisense nucleic acid sequence is at least 90% identical to SEQ ID NO: 214. In embodiments, the antisense nucleic acid sequence is at least 90% identical to SEQ ID NO: 215. In embodiments, the antisense nucleic acid sequence is at least 90% identical to SEQ ID NO: 216. In embodiments, the antisense nucleic acid sequence is at least 90% identical to SEQ ID NO: 217.

[0193] In embodiments, the antisense nucleic acid sequence includes SEQ ID NO: 30. In embodiments, the antisense nucleic acid sequence includes SEQ ID NO: 31. In embodiments, the antisense nucleic acid sequence includes SEQ ID NO: 32. In embodiments, the antisense nucleic acid sequence includes SEQ ID NO: 33. In embodiments, the antisense nucleic acid sequence includes SEQ ID NO: 34. In embodiments, the antisense nucleic acid sequence includes SEQ ID NO: 35. In embodiments, the antisense nucleic acid sequence includes SEQ ID NO: 36. In embodiments, the antisense nucleic acid sequence includes SEQ ID NO: 37. In embodiments, the antisense nucleic acid sequence includes SEQ ID NO: 38. In embodiments, the antisense nucleic acid sequence includes SEQ ID NO: 39. In embodiments, the antisense nucleic acid sequence includes SEQ ID NO: 40. In embodiments, the antisense nucleic acid sequence includes SEQ ID NO: 41. In embodiments, the antisense nucleic acid sequence includes SEQ ID NO: 42. In embodiments, the antisense nucleic acid sequence includes SEQ ID NO: 43. In embodiments, the antisense nucleic acid sequence includes SEQ ID NO: 44. In embodiments, the antisense nucleic acid sequence includes SEQ ID NO: 45. In embodiments, the antisense nucleic acid sequence includes SEQ ID NO: 46. In embodiments, the antisense nucleic acid sequence includes SEQ ID NO: 47. In embodiments, the antisense nucleic acid sequence includes SEQ ID NO: 48. In embodiments, the antisense nucleic acid sequence includes SEQ ID NO: 49. In embodiments, the antisense nucleic acid sequence includes SEQ ID NO: 50. In embodiments, the antisense nucleic acid sequence includes SEQ ID NO: 51. In embodiments, the antisense nucleic acid sequence includes SEQ ID NO: 52. In embodiments, the antisense nucleic acid sequence includes SEQ ID NO: 53. In embodiments, the antisense nucleic acid sequence includes SEQ ID NO: 54. In embodiments, the antisense nucleic acid sequence includes SEQ ID NO: 55. In embodiments, the antisense nucleic acid sequence includes SEQ ID NO: 56. In embodiments, the antisense nucleic acid sequence includes SEQ ID NO: 57. In embodiments, the antisense nucleic acid sequence includes SEQ ID NO: 58. In embodiments, the antisense nucleic acid sequence includes SEQ ID NO: 59. In embodiments, the antisense nucleic acid sequence includes SEQ ID NO: 60. In embodiments, the antisense nucleic acid sequence includes SEQ ID NO: 61. In embodiments, the antisense nucleic acid sequence includes SEQ ID NO: 62. In embodiments, the antisense nucleic acid sequence includes SEQ ID NO: 63. In embodiments, the antisense nucleic acid sequence includes SEQ ID NO: 64. In embodiments, the antisense nucleic acid sequence includes SEQ ID NO: 65. In embodiments, the antisense nucleic acid sequence includes SEQ ID NO: 66. In embodiments, the antisense nucleic acid sequence includes SEQ ID NO: 67. In embodiments, the antisense nucleic acid sequence includes SEQ ID NO: 68. In embodiments, the antisense nucleic acid sequence includes SEQ ID NO: 69. In embodiments, the antisense nucleic acid sequence includes SEQ ID NO: 70. In embodiments, the antisense nucleic acid sequence includes SEQ ID NO: 71. In embodiments, the antisense nucleic acid sequence includes SEQ ID NO: 72. In embodiments, the antisense nucleic acid sequence includes SEQ ID NO: 73. In embodiments, the antisense nucleic acid sequence includes SEQ ID NO: 74. In embodiments, the antisense nucleic acid sequence includes SEQ ID NO: 75. In embodiments, the antisense nucleic acid sequence includes SEQ ID NO: 76. In embodiments, the antisense nucleic acid sequence includes SEQ ID NO: 76. In embodiments, the antisense nucleic acid sequence includes SEQ ID NO: 77. In embodiments, the antisense nucleic acid sequence includes SEQ ID NO: 78. In embodiments, the antisense nucleic acid sequence includes SEQ ID NO: 79. In embodiments, the antisense nucleic acid sequence includes SEQ ID NO: 80. In embodiments, the antisense nucleic acid sequence includes SEQ ID NO: 81. In embodiments, the antisense nucleic acid sequence includes SEQ ID NO: 82. In embodiments, the antisense nucleic acid sequence includes SEQ ID NO: 83. In embodiments, the antisense nucleic acid sequence includes SEQ ID NO: 84. In embodiments, the antisense nucleic acid sequence includes SEQ ID NO: 84. In embodiments, the antisense nucleic acid sequence includes SEQ ID NO: 85. In embodiments, the antisense nucleic acid sequence includes SEQ ID NO: 86. In embodiments, the antisense nucleic acid sequence includes SEQ ID NO: 87. In embodiments, the antisense nucleic acid sequence includes SEQ ID NO: 88. In embodiments, the antisense nucleic acid sequence includes SEQ ID NO: 89. In embodiments, the antisense nucleic acid sequence includes SEQ ID NO: 90. In embodiments, the antisense nucleic acid sequence includes SEQ ID NO: 91. In embodiments, the antisense nucleic acid sequence includes SEQ ID NO: 92. In embodiments, the antisense nucleic acid sequence includes SEQ ID NO: 93. In embodiments, the antisense nucleic acid sequence includes SEQ ID NO: 94. In embodiments, the antisense nucleic acid sequence includes SEQ ID NO: 95. In embodiments, the antisense nucleic acid sequence includes SEQ ID NO: 96. In embodiments, the antisense nucleic acid sequence includes SEQ ID NO: 97. In embodiments, the antisense nucleic acid sequence includes SEQ ID NO: 98. In embodiments, the antisense nucleic acid sequence includes SEQ ID NO: 99. In embodiments, the antisense nucleic acid sequence includes SEQ ID NO: 100. In embodiments, the antisense nucleic acid sequence includes SEQ ID NO: 101. In embodiments, the antisense nucleic acid sequence includes SEQ ID NO: 102. In embodiments, the antisense nucleic acid sequence includes SEQ ID NO: 103. In embodiments, the antisense nucleic acid sequence includes SEQ ID NO: 104. In embodiments, the antisense nucleic acid sequence includes SEQ ID NO: 105. In embodiments, the antisense nucleic acid sequence includes SEQ ID NO: 106. In embodiments, the antisense nucleic acid sequence includes SEQ ID NO: 107. In embodiments, the antisense nucleic acid sequence includes SEQ ID NO: 108. In embodiments, the antisense nucleic acid sequence includes SEQ ID NO: 109. In embodiments, the antisense nucleic acid sequence includes SEQ ID NO: 110. In embodiments, the antisense nucleic acid sequence includes SEQ ID NO: 111. In embodiments, the antisense nucleic acid sequence includes SEQ ID NO: 112. In embodiments, the antisense nucleic acid sequence includes SEQ ID NO: 113. In embodiments, the antisense nucleic acid sequence includes SEQ ID NO: 114. In embodiments, the antisense nucleic acid sequence includes SEQ ID NO: 115. In embodiments, the antisense nucleic acid sequence includes SEQ ID NO: 116. In embodiments, the antisense nucleic acid sequence includes SEQ ID NO: 117. In embodiments, the antisense nucleic acid sequence includes SEQ ID NO: 118. In embodiments, the antisense nucleic acid sequence includes SEQ ID NO: 119. In embodiments, the antisense nucleic acid sequence includes SEQ ID NO: 120. In embodiments, the antisense nucleic acid sequence includes SEQ ID NO: 121. In embodiments, the antisense nucleic acid sequence includes SEQ ID NO: 126. In embodiments, the antisense nucleic acid sequence includes SEQ ID NO: 127. In embodiments, the antisense nucleic acid sequence includes SEQ ID NO: 128. In embodiments, the antisense nucleic acid sequence includes SEQ ID NO: 129. In embodiments, the antisense nucleic acid sequence includes SEQ ID NO: 130. In embodiments, the antisense nucleic acid sequence includes SEQ ID NO: 131. In embodiments, the antisense nucleic acid sequence includes SEQ ID NO: 132. In embodiments, the antisense nucleic acid sequence includes SEQ ID NO: 133. In embodiments, the antisense nucleic acid sequence includes SEQ ID NO: 134. In embodiments, the antisense nucleic acid sequence includes SEQ ID NO: 135. In embodiments, the antisense nucleic acid sequence includes SEQ ID NO: 136. In embodiments, the antisense nucleic acid sequence includes SEQ ID NO: 137. In embodiments, the antisense nucleic acid sequence includes SEQ ID NO: 138. In embodiments, the antisense nucleic acid sequence includes SEQ ID NO: 139. In embodiments, the antisense nucleic acid sequence includes SEQ ID NO: 140. In embodiments, the antisense nucleic acid sequence includes SEQ ID NO: 141. In embodiments, the antisense nucleic acid sequence includes SEQ ID NO: 142. In embodiments, the antisense nucleic acid sequence includes SEQ ID NO: 143. In embodiments, the antisense nucleic acid sequence includes SEQ ID NO: 144. In embodiments, the antisense nucleic acid sequence includes SEQ ID NO: 145. In embodiments, the antisense nucleic acid sequence includes SEQ ID NO: 146. In embodiments, the antisense nucleic acid sequence includes SEQ ID NO: 147. In embodiments, the antisense nucleic acid sequence includes SEQ ID NO: 148. In embodiments, the antisense nucleic acid sequence includes SEQ ID NO: 149. In embodiments, the antisense nucleic acid sequence includes SEQ ID NO: 150. In embodiments, the antisense nucleic acid sequence includes SEQ ID NO: 151. In embodiments, the antisense nucleic acid sequence includes SEQ ID NO: 152. In embodiments, the antisense nucleic acid sequence includes SEQ ID NO: 153. In embodiments, the antisense nucleic acid sequence includes SEQ ID NO: 154. In embodiments, the antisense nucleic acid sequence includes SEQ ID NO: 155. In embodiments, the antisense nucleic acid sequence includes SEQ ID NO: 156. In embodiments, the antisense nucleic acid sequence includes SEQ ID NO: 157. In embodiments, the antisense nucleic acid sequence includes SEQ ID NO: 158. In embodiments, the antisense nucleic acid sequence includes SEQ ID NO: 159. In embodiments, the antisense nucleic acid sequence includes SEQ ID NO: 160. In embodiments, the antisense nucleic acid sequence includes SEQ ID NO: 161. In embodiments, the antisense nucleic acid sequence includes SEQ ID NO: 162. In embodiments, the antisense nucleic acid sequence includes SEQ ID NO: 163. In embodiments, the antisense nucleic acid sequence includes SEQ ID NO: 164. In embodiments, the antisense nucleic acid sequence includes SEQ ID NO: 165. In embodiments, the antisense nucleic acid sequence includes SEQ ID NO: 166. In embodiments, the antisense nucleic acid sequence includes SEQ ID NO: 167. In embodiments, the antisense nucleic acid sequence includes SEQ ID NO: 168. In embodiments, the antisense nucleic acid sequence includes SEQ ID NO: 169. In embodiments, the antisense nucleic acid sequence includes SEQ ID NO: 170. In embodiments, the antisense nucleic acid sequence includes SEQ ID NO: 171. In embodiments, the antisense nucleic acid sequence includes SEQ ID NO: 172. In embodiments, the antisense nucleic acid sequence includes SEQ ID NO: 173. In embodiments, the antisense nucleic acid sequence includes SEQ ID NO: 174. In embodiments, the antisense nucleic acid sequence includes SEQ ID NO: 175. In embodiments, the antisense nucleic acid sequence includes SEQ ID NO: 176. In embodiments, the antisense nucleic acid sequence includes SEQ ID NO: 176. In embodiments, the antisense nucleic acid sequence includes SEQ ID NO: 177. In embodiments, the antisense nucleic acid sequence includes SEQ ID NO: 178. In embodiments, the antisense nucleic acid sequence includes SEQ ID NO: 179. In embodiments, the antisense nucleic acid sequence includes SEQ ID NO: 180. In embodiments, the antisense nucleic acid sequence includes SEQ ID NO: 181. In embodiments, the antisense nucleic acid sequence includes SEQ ID NO: 182. In embodiments, the antisense nucleic acid sequence includes SEQ ID NO: 183. In embodiments, the antisense nucleic acid sequence includes SEQ ID NO: 184. In embodiments, the antisense nucleic acid sequence includes SEQ ID NO: 184. In embodiments, the antisense nucleic acid sequence includes SEQ ID NO: 185. In embodiments, the antisense nucleic acid sequence includes SEQ ID NO: 186. In embodiments, the antisense nucleic acid sequence includes SEQ ID NO: 187. In embodiments, the antisense nucleic acid sequence includes SEQ ID NO: 188. In embodiments, the antisense nucleic acid sequence includes SEQ ID NO: 189. In embodiments, the antisense nucleic acid sequence includes SEQ ID NO: 190. In embodiments, the antisense nucleic acid sequence includes SEQ ID NO: 191. In embodiments, the antisense nucleic acid sequence includes SEQ ID NO: 192. In embodiments, the antisense nucleic acid sequence includes SEQ ID NO: 193. In embodiments, the antisense nucleic acid sequence includes SEQ ID NO: 194. In embodiments, the antisense nucleic acid sequence includes SEQ ID NO: 195. In embodiments, the antisense nucleic acid sequence includes SEQ ID NO: 196. In embodiments, the antisense nucleic acid sequence includes SEQ ID NO: 197. In embodiments, the antisense nucleic acid sequence includes SEQ ID NO: 198. In embodiments, the antisense nucleic acid sequence includes SEQ ID NO: 199. In embodiments, the antisense nucleic acid sequence includes SEQ ID NO: 200. In embodiments, the antisense nucleic acid sequence includes SEQ ID NO: 201. In embodiments, the antisense nucleic acid sequence includes SEQ ID NO: 202. In embodiments, the antisense nucleic acid sequence includes SEQ ID NO: 203. In embodiments, the antisense nucleic acid sequence includes SEQ ID NO: 204. In embodiments, the antisense nucleic acid sequence includes SEQ ID NO: 205. In embodiments, the antisense nucleic acid sequence includes SEQ ID NO: 206. In embodiments, the antisense nucleic acid sequence includes SEQ ID NO: 207. In embodiments, the antisense nucleic acid sequence includes SEQ ID NO: 208. In embodiments, the antisense nucleic acid sequence includes SEQ ID NO: 209. In embodiments, the antisense nucleic acid sequence includes SEQ ID NO: 210. In embodiments, the antisense nucleic acid sequence includes SEQ ID NO: 211. In embodiments, the antisense nucleic acid sequence includes SEQ ID NO: 212. In embodiments, the antisense nucleic acid sequence includes SEQ ID NO: 213. In embodiments, the antisense nucleic acid sequence includes SEQ ID NO: 214. In embodiments, the antisense nucleic acid sequence includes SEQ ID NO: 215. In embodiments, the antisense nucleic acid sequence includes SEQ ID NO: 216. In embodiments, the antisense nucleic acid sequence includes SEQ ID NO: 217.

[0194] An antisense nucleic acid sequence may include a sequence at least 80%, at least 85%, at least 90%, at least 95%, at least 98%, at least 99%, or 100% identical to SEQ ID NO: 141. An antisense nucleic acid sequence may include a sequence at least 80%, at least 85%, at least 90%, at least 95%, at least 98%, at least 99%, or 100% identical to SEQ ID NO: 191. An antisense nucleic acid sequence may include a sequence at least 80%, at least 85%, at least 90%, at least 95%, at least 98%, at least 99%, or 100% identical to SEQ ID NO: 250. An antisense nucleic acid sequence may include a sequence at least 80%, at least 85%, at least 90%, at least 95%, at least 98%, at least 99%, or 100% identical to SEQ ID NO: 251. An antisense nucleic acid sequence may include a sequence at least 80%, at least 85%, at least 90%, at least 95%, at least 98%, at least 99%, or 100% identical to SEQ ID NO: 252. An antisense nucleic acid sequence may include a sequence at least 80%, at least 85%, at least 90%, at least 95%, at least 98%, at least 99%, or 100% identical to SEQ ID NO: 253. An antisense nucleic acid sequence may include a sequence at least 80%, at least 85%, at least 90%, at least 95%, at least 98%, at least 99%, or 100% identical to SEQ ID NO: 254. An antisense nucleic acid sequence may include a sequence at least 80%, at least 85%, at least 90%, at least 95%, at least 98%, at least 99%, or 100% identical to SEQ ID NO: 255. An antisense nucleic acid sequence may include a sequence at least 80%, at least 85%, at least 90%, at least 95%, at least 98%, at least 99%, or 100% identical to SEQ ID NO: 256. An antisense nucleic acid sequence may include a sequence at least 80%, at least 85%, at least 90%, at least 95%, at least 98%, at least 99%, or 100% identical to SEQ ID NO: 257. An antisense nucleic acid sequence may include a sequence at least 80%, at least 85%, at least 90%, at least 95%, at least 98%, at least 99%, or 100% identical to SEQ ID NO: 258. An antisense nucleic acid sequence may include a sequence at least 80%, at least 85%, at least 90%, at least 95%, at least 98%, at least 99%, or 100% identical to SEQ ID NO: 259. An antisense nucleic acid sequence may include a sequence at least 80%, at least 85%, at least 90%, at least 95%, at least 98%, at least 99%, or 100% identical to SEQ ID NO: 260. An antisense nucleic acid sequence may include a sequence at least 80%, at least 85%, at least 90%, at least 95%, at least 98%, at least 99%, or 100% identical to SEQ ID NO: 261. An antisense nucleic acid sequence may include a sequence at least 80%, at least 85%, at least 90%, at least 95%, at least 98%, at least 99%, or 100% identical to SEQ ID NO: 262. An antisense nucleic acid sequence may include a sequence at least 80%, at least 85%, at least 90%, at least 95%, at least 98%, at least 99%, or 100% identical to SEQ ID NO: 263. An antisense nucleic acid sequence may include a sequence at least 80%, at least 85%, at least 90%, at least 95%, at least 98%, at least 99%, or 100% identical to SEQ ID NO: 264. An antisense nucleic acid sequence may include a sequence at least 80%, at least 85%, at least 90%, at least 95%, at least 98%, at least 99%, or 100% identical to SEQ ID NO: 265. An antisense nucleic acid sequence may include a sequence at least 80%, at least 85%, at least 90%, at least 95%, at least 98%, at least 99%, or 100% identical to SEQ ID NO: 266. An antisense nucleic acid sequence may include a sequence at least 80%, at least 85%, at least 90%, at least 95%, at least 98%, at least 99%, or 100% identical to SEQ ID NO: 267. An antisense nucleic acid sequence may include a sequence at least 80%, at least 85%, at least 90%, at least 95%, at least 98%, at least 99%, or 100% identical to SEQ ID NO: 268. An antisense nucleic acid sequence may include a sequence at least 80%, at least 85%, at least 90%, at least 95%, at least 98%, at least 99%, or 100% identical to SEQ ID NO: 269. An antisense nucleic acid sequence may include a sequence at least 80%, at least 85%, at least 90%, at least 95%, at least 98%, at least 99%, or 100% identical to SEQ ID NO: 270. An antisense nucleic acid sequence may include a sequence at least 80%, at least 85%, at least 90%, at least 95%, at least 98%, at least 99%, or 100% identical to SEQ ID NO: 271. An antisense nucleic acid sequence may include a sequence at least 80%, at least 85%, at least 90%, at least 95%, at least 98%, at least 99%, or 100% identical to SEQ ID NO: 272. An antisense nucleic acid sequence may include a sequence at least 80%, at least 85%, at least 90%, at least 95%, at least 98%, at least 99%, or 100% identical to SEQ ID NO: 273. An antisense nucleic acid sequence may include a sequence at least 80%, at least 85%, at least 90%, at least 95%, at least 98%, at least 99%, or 100% identical to SEQ ID NO: 274. An antisense nucleic acid sequence may include a sequence at least 80%, at least 85%, at least 90%, at least 95%, at least 98%, at least 99%, or 100% identical to SEQ ID NO: 275. An antisense nucleic acid sequence may include a sequence at least 80%, at least 85%, at least 90%, at least 95%, at least 98%, at least 99%, or 100% identical to SEQ ID NO: 276. An antisense nucleic acid sequence may include a sequence at least 80%, at least 85%, at least 90%, at least 95%, at least 98%, at least 99%, or 100% identical to SEQ ID NO: 277. An antisense nucleic acid sequence may include a sequence at least 80%, at least 85%, at least 90%, at least 95%, at least 98%, at least 99%, or 100% identical to SEQ ID NO: 278. An antisense nucleic acid sequence may include a sequence at least 80%, at least 85%, at least 90%, at least 95%, at least 98%, at least 99%, or 100% identical to SEQ ID NO: 279. An antisense nucleic acid sequence may include a sequence at least 80%, at least 85%, at least 90%, at least 95%, at least 98%, at least 99%, or 100% identical to SEQ ID NO: 280.

[0195] In embodiments, the antisense nucleic acid sequence is 3′ or downstream relative to the ESS nucleic acid sequence within the silencing module.

### SMOPT

[0196] Described herein, in some embodiments, are systems that include a Sm binding site. The Sm binding site may be included in a modified or recombinant snRNA or U7 snRNA. Sm proteins may bind to a U7 snRNA via the Sm binding site. Once the Sm proteins bind the U7 snRNA in the cytoplasm they may bind to a pre-mRNA and regulate splicing. In some embodiments, the system contains a Sm-like binding site. A modified or recombinant U7 snRNA sequence may include a Sm binding site. A system may encode a modified or recombinant U7 snRNA sequence that includes a Sm binding site.

[0197] For the system provided herein, in embodiments, the silencing module includes a sequence capable of binding or recruiting one or more proteins capable of splicing RNA. In embodiments, the silencing module further includes an Sm binding site sequence. The term “Sm binding site sequence” refers to a nucleic acid sequence typically found in U snRNA capable of binding and/or recruiting Sm proteins. Binding of Sm proteins to U snRNA results in formation of the snRNP complex, which is typically involved in RNA processing. In embodiments, U7 specific proteins (e.g. Lsm10 and Lsm11) to the bind to a Sm binding site of U7 snRNA to form the U7 snRNP, allowing histone RNA processing.

[0198] In embodiments, the Sm binding site sequence includes AAUUUGUCUAG (SEQ ID NO: 243) or AAUUUUUGGAG (SEQ ID NO: 244; smOPT). In embodiments, the Sm binding site sequence includes SEQ ID NO: 243. In embodiments, the Sm binding site sequence is SEQ ID NO: 243. In embodiments, the Sm binding site sequence includes SEQ ID NO: 244. In embodiments, the Sm binding site sequence is SEQ ID NO: 244.

[0199] In embodiments, the Sm binding site sequence includes an smOPT sequence. In embodiments, the smOPT sequence includes SEQ ID NO: 244. The term “smOPT sequence” as used herein refers to a nucleic acid sequence that binds and/or recruits proteins involved in non-histone RNA splicing. Thus, in embodiments, the smOPT sequence does not bind and/or recruit spliceosomal proteins specifically involved in histone processing. In embodiments, the smOPT sequence does not bind to proteins that specifically bind to U7 snRNA. In embodiments, the smOPT sequence binds and/or recruits proteins involved in non-histone mRNA processing. In embodiments, the smOPT sequence does not bind and/or recruit Lsm10 or Lsm11. In embodiments, the smOPT sequence does not bind and/or recruit Lsm10. In embodiments, the smOPT sequence does not bind and/or recruit Lsm11.

[0200] In embodiments, the smOPT sequence includes a consensus sequence found in a variety of snRNA. In embodiments, the consensus sequence includes SEQ ID NO: 244. The smOPT sequence may bind to proteins, forming a structure including a hepameric protein core.

[0201] In embodiments, the Sm binding site sequence is 3′ or downstream relative to the silencing module promoter sequence, the ESS nucleic acid sequence, or the antisense nucleic acid sequence within the silencing module. In embodiments, the Sm binding site sequence is 3′ or downstream relative to the silencing module promoter sequence. In embodiments, the Sm binding site sequence is 3′ or downstream relative to the ESS nucleic acid sequence. In embodiments, the Sm binding site sequence is 3′ or downstream relative to the antisense nucleic acid sequence within the silencing module.

### U7 3′ Hairpin

[0202] Described herein, in some embodiments, are systems that include a hairpin sequence. The hairpin sequence may be included in a modified or recombinant snRNA or U7 snRNA. The hairpin sequence may include a U7 hairpin sequence. The U7 hairpin sequence may be a 3′ U7 hairpin sequence. A modified or recombinant U7 snRNA sequence may include the hairpin sequence. A system may encode a modified or recombinant U7 snRNA sequence that includes a hairpin sequence.

[0203] For the system provided herein, in embodiments, the silencing module further includes a hairpin sequence. In embodiments, the hairpin sequence includes a U7 small nuclear RNA (snRNA) 3′ hairpin sequence. For example, the hairpin sequence may be a hairpin sequence found in naturally occurring U7 snRNA. In embodiments, the hairpin sequence is 3′ or downstream relative to the silencing module promoter sequence, the ESS nucleic acid sequence, the antisense nucleic acid sequence, or the Sm binding site sequence within the silencing module. In embodiments, the hairpin sequence is 3′ or downstream relative to the silencing module promoter sequence within the silencing module. In embodiments, the hairpin sequence is 3′ or downstream relative to the ESS nucleic acid sequence within the silencing module. In embodiments, the hairpin sequence is 3′ or downstream relative to the antisense nucleic acid sequence within the silencing module. In embodiments, the hairpin sequence is 3′ or downstream relative to the Sm binding site sequence within the silencing module.

### 3′ Terminator Sequence

[0204] For the system provided herein, in embodiments, the silencing module further includes a terminator sequence. In embodiments, the terminator sequence includes a mouse or human terminator sequence. In embodiments, the terminator sequence includes a mouse terminator sequence. In embodiments, the terminator sequence includes a human terminator sequence. A silencing module terminator sequence may include or be a recombinant regulatory element herein that includes or is a terminator sequence.

[0205] In some embodiments, the silencing module terminator includes a mouse U1 snRNA (“MmU1”) terminator, a mouse U2 snRNA (“MmU2”) terminator, a mouse U3 snRNA (“MmU3”) terminator, a mouse U4 snRNA (“MmU4”) terminator, a mouse U5 snRNA (“MmU5”) terminator, a mouse U6 snRNA (“MmU6”) terminator, a mouse U7 snRNA (“MmU7”) terminator, a mouse U11 snRNA (“MmU11”) terminator, a mouse U12 snRNA (“MmU12”) terminator, a mouse U7SK snRNA (“MmU7SK”) terminator, a human U1 snRNA (“HsU1”) terminator, a human U2 snRNA (“HsU2”) terminator, a human U3 snRNA (“HsU3”) terminator, a human U4 snRNA (“HsU4”) terminator, a human U5 snRNA (“HsU5”) terminator, a human U6 snRNA (“HsU6”) terminator, a human U7 snRNA (“HsU7”) terminator, a human U11 snRNA (“HsU11”) terminator, a human U12 snRNA (“HsU12”) terminator, a human U7SK snRNA (“HsU7SK”) terminator, or a functional combination of fragments thereof.

[0206] The silencing module terminator may include a MmU1 terminator. The silencing module terminator may include a MmU2 terminator. The silencing module terminator may include a MmU3 terminator. The silencing module terminator may include a MmU4 terminator. The silencing module terminator may include a MmU5 terminator. The silencing module terminator may include a MmU6 terminator. The silencing module terminator may include a MmU7 terminator. The silencing module terminator may include a MmU11 terminator. The silencing module terminator may include a MmU12 terminator. The silencing module terminator may include a MmU7SK terminator. The silencing module terminator may include a HsU1 terminator. The silencing module terminator may include a HsU2 terminator. The silencing module terminator may include a HsU3 terminator. The silencing module terminator may include a HsU4 terminator. The silencing module terminator may include a HsU5 terminator. The silencing module terminator may include a HsU6 terminator. The silencing module terminator may include a HsU7 terminator. The silencing module terminator may include a HsU11 terminator. The silencing module terminator may include a HsU12 terminator. The silencing module terminator may include a HsU7SK terminator.

[0207] The silencing module terminator may include a terminator fragment or a combination of terminator fragments. The silencing module terminator may include a MmU1 terminator fragment. The silencing module terminator fragment may include a MmU2 terminator fragment. The silencing module terminator fragment may include a MmU3 terminator fragment. The silencing module terminator fragment may include a MmU4 terminator fragment. The silencing module terminator fragment may include a MmU5 terminator fragment. The silencing module terminator fragment may include a MmU6 terminator fragment. The silencing module terminator fragment may include a MmU7 terminator fragment. The silencing module terminator fragment may include a MmU11 terminator fragment. The silencing module terminator fragment may include a MmU12 terminator fragment. The silencing module terminator fragment may include a MmU7SK terminator fragment. The silencing module terminator fragment may include a HsU1 terminator fragment. The silencing module terminator fragment may include a HsU2 terminator fragment. The silencing module terminator fragment may include a HsU3 terminator fragment. The silencing module terminator fragment may include a HsU4 terminator fragment. The silencing module terminator fragment may include a HsU5 terminator fragment. The silencing module terminator fragment may include a HsU6 terminator fragment. The silencing module terminator fragment may include a HsU7 terminator fragment. The silencing module terminator fragment may include a HsU11 terminator fragment. The silencing module terminator fragment may include a HsU12 terminator fragment. The silencing module terminator fragment may include a HsU7SK terminator fragment.

[0208] The silencing module terminator may include a proximal end of a terminator. The silencing module terminator proximal end may include a MmU1 terminator proximal end fragment. The silencing module terminator proximal end fragment may include a MmU2 terminator proximal end fragment. The silencing module terminator proximal end fragment may include a MmU3 terminator proximal end fragment. The silencing module terminator proximal end fragment may include a MmU4 terminator proximal end fragment. The silencing module terminator proximal end fragment may include a MmU5 terminator proximal end fragment. The silencing module terminator proximal end fragment may include a MmU6 terminator proximal end fragment. The silencing module terminator proximal end fragment may include a MmU7 terminator proximal end fragment. The silencing module terminator proximal end fragment may include a MmU11 terminator proximal end fragment. The silencing module terminator proximal end fragment may include a MmU12 terminator proximal end fragment. The silencing module terminator proximal end fragment may include a MmU7SK terminator proximal end fragment. The silencing module terminator proximal end fragment may include a HsU1 terminator proximal end fragment. The silencing module terminator proximal end fragment may include a HsU2 terminator proximal end fragment. The silencing module terminator proximal end fragment may include a HsU3 terminator proximal end fragment. The silencing module terminator proximal end fragment may include a HsU4 terminator proximal end fragment. The silencing module terminator proximal end fragment may include a HsU5 terminator proximal end fragment. The silencing module terminator proximal end fragment may include a HsU6 terminator proximal end fragment. The silencing module terminator proximal end fragment may include a HsU7 terminator proximal end fragment. The silencing module terminator proximal end fragment may include a HsU11 terminator proximal end fragment. The silencing module terminator proximal end fragment may include a HsU12 terminator proximal end fragment. The silencing module terminator proximal end fragment may include a HsU7SK terminator proximal end fragment.

[0209] The silencing module terminator may include a distal end of a terminator. The silencing module terminator distal end may include a MmU1 terminator distal end fragment. The silencing module terminator distal end fragment may include a MmU2 terminator distal end fragment. The silencing module terminator distal end fragment may include a MmU3 terminator distal end fragment. The silencing module terminator distal end fragment may include a MmU4 terminator distal end fragment. The silencing module terminator distal end fragment may include a MmU5 terminator distal end fragment. The silencing module terminator distal end fragment may include a MmU6 terminator distal end fragment. The silencing module terminator distal end fragment may include a MmU7 terminator distal end fragment. The silencing module terminator distal end fragment may include a MmU11 terminator distal end fragment. The silencing module terminator distal end fragment may include a MmU12 terminator distal end fragment. The silencing module terminator distal end fragment may include a MmU7SK terminator distal end fragment. The silencing module terminator distal end fragment may include a HsU1 terminator distal end fragment. The silencing module terminator distal end fragment may include a HsU2 terminator distal end fragment. The silencing module terminator distal end fragment may include a HsU3 terminator distal end fragment. The silencing module terminator distal end fragment may include a HsU4 terminator distal end fragment. The silencing module terminator distal end fragment may include a HsU5 terminator distal end fragment. The silencing module terminator distal end fragment may include a HsU6 terminator distal end fragment. The silencing module terminator distal end fragment may include a HsU7 terminator distal end fragment. The silencing module terminator distal end fragment may include a HsU11 terminator distal end fragment. The silencing module terminator distal end fragment may include a HsU12 terminator distal end fragment. The silencing module terminator distal end fragment may include a HsU7SK terminator distal end fragment.

[0210] In some embodiments, the terminator sequence may include a nucleic acid sequence. In some embodiments, the terminator sequence may include a nucleic acid sequence identical to a terminator sequence in Table 8. In some embodiments, the terminator sequence may include a nucleic acid sequence at least 99% identical to a terminator sequence in Table 8. In some embodiments, the terminator sequence may include a nucleic acid sequence at least 98% identical to a terminator sequence in Table 8. In some embodiments, the terminator sequence may include a nucleic acid sequence at least 97% identical to a terminator sequence in Table 8. In some embodiments, the terminator sequence may include a nucleic acid sequence at least 96% identical to a terminator sequence in Table 8. In some embodiments, the terminator sequence may include a nucleic acid sequence at least 95% identical to a terminator sequence in Table 8. In some embodiments, the terminator sequence may include a nucleic acid sequence at least 94% identical to a terminator sequence in Table 8. In some embodiments, the terminator sequence may include a nucleic acid sequence at least 93% identical to a terminator sequence in Table 8. In some embodiments, the terminator sequence may include a nucleic acid sequence at least 92% identical to a terminator sequence in Table 8. In some embodiments, the terminator sequence may include a nucleic acid sequence at least 91% identical to a terminator sequence in Table 8. In some embodiments, the terminator sequence may include a nucleic acid sequence at least 90% identical to a terminator sequence in Table 8. In some embodiments, the terminator sequence may include a nucleic acid sequence at least 85% identical to a terminator sequence in Table 8. In some embodiments, the terminator sequence may include a nucleic acid sequence at least 80% identical to a terminator sequence in Table 8. In some embodiments, the terminator sequence may include a nucleic acid sequence at least 75% identical to a terminator sequence in Table 8. In some embodiments, the terminator sequence may include a nucleic acid sequence at least 70% identical to a terminator sequence in Table 8.

[0211] The terminator sequence may be operably connected with an ESS sequence, a U7 targeting sequence, a Sm binding site, or a U7 3′ hairpin, or a combination thereof. For example, The terminator sequence may be operably connected with an ESS sequence, a U7 targeting sequence, a Sm binding site, and a U7 3′ hairpin within an expression construct.

[0212] In embodiments, the terminator sequence includes a U7 snRNA terminator sequence. In embodiments, the terminator sequence includes a U1 terminator sequence. In embodiments, the terminator sequence includes a Mm U7 terminator sequence, a Hs U7 terminator sequence, a mulal terminator sequence, or a HUI terminator sequence, or a fragment or combination of fragments thereof. In embodiments, the terminator sequence includes a Mm U7 terminator sequence or a fragment thereof. In embodiments, the terminator sequence includes a Hs U7 terminator sequence or a fragment thereof. In embodiments, the terminator sequence includes a mulal terminator sequence or a fragment thereof. In embodiments, the terminator sequence includes a HU1 terminator sequence or a fragment thereof.

[0213] In embodiments, the terminator sequence includes a U7 snRNA terminator sequence having a distal sequence element (DSE) replaced with a DSE of a U1-1 or U1a1 terminator sequence. In embodiments, the terminator sequence includes a U7 snRNA terminator sequence having a DSE replaced with a DSE of a U1-1 terminator sequence. In embodiments, the terminator sequence includes a U7 snRNA terminator sequence having a DSE replaced with a DSE of a U1a1 terminator sequence. “Distal sequence element” or “DSE” refers to a nucleic acid sequence that regulates expression of snRNA gene. A distal sequence element may, in embodiments, be found upstream of an snRNA promoter. The DSE may include one or more binding sites for a transcription factor and/or one or more proteins that activate transcription of the snRNA.

[0214] In embodiments, the terminator sequence includes a mouse U7 snRNA terminator sequence having a proximal sequence element (PSE) replaced with a PSE of a U1-1 or U1a1 terminator sequence. In embodiments, the terminator sequence includes a mouse U7 snRNA terminator sequence having a PSE replaced with a PSE of a U1-1 terminator sequence. In embodiments, the terminator sequence includes a mouse U7 snRNA terminator sequence having a PSE replaced with a PSE of U1a1 terminator sequence. “Proximal sequence element” or “PSE” refers to a sequence typically found in snRNA genes that regulate expressing of the snRNA gene. The PSE is typically found in RNA Pol II and RNA Pol III transcribed snRNA genes. In embodiments, the PSE includes a PSE-binding transcription factor (PTF) binding site.

[0215] In embodiments, the terminator sequence is 3′ or downstream relative to the silencing module promoter sequence, the ESS nucleic acid sequence, the antisense nucleic acid sequence, the Sm binding site sequence, or the hairpin sequence.

[0216] In embodiments, the terminator sequence is 3′ or downstream relative to the silencing module promoter sequence, the ESS nucleic acid sequence, the antisense nucleic acid sequence, the Sm binding site sequence, or the hairpin sequence. In embodiments, the terminator sequence is 3′ or downstream relative to the silencing module promoter sequence. In embodiments, the terminator sequence is 3′ or downstream relative to the ESS nucleic acid sequence. In embodiments, the terminator sequence is 3′ or downstream relative to the antisense nucleic acid sequence. In embodiments, the terminator sequence is 3′ or downstream relative to the hairpin sequence.

### Recombinant Regulatory Elements

[0217] Described herein, in some embodiments, are recombinant regulatory elements. A recombinant regulatory element may be included in a silencing module herein. For example, a promoter of a silencing module may comprise a promoter sequence of a regulatory element herein. A terminator of a silencing module may comprise a terminator sequence of a regulatory element herein.

[0218] Described herein, in some embodiments, is a nucleic acid system that may contain one or more regulatory elements such as a promoter sequence or a terminator sequence. The promoter or terminator sequence may be a part of an expression construct. The expression construct may mix and match regulatory sequences such as promoter sequences or terminator sequences from various organism species, or from various genes of a species. A regulatory sequence may mix and match elements such as a distal or proximal end sequence from various organism species, or from various genes of a species.

[0219] Described herein, in some embodiments, is a nucleic acid expression system. In some embodiments, the nucleic acid expression system may contain a regulatory sequence operably coupled to a transcribable region of a nucleic acid. In some embodiments, the regulatory sequence may comprise a proximal regulatory sequence element (PSE). In some embodiments, the regulatory sequence may comprise a distal regulatory sequence element (DSE). In some embodiments, the regulatory sequence may comprise a PSE and a DSE. In some embodiments, the PSE may be comprised of a PSE sequence of a first small nuclear RNA (snRNA) of a first organism species. In some embodiments, the DSE may include a DSE sequence of a second small nuclear RNA (snRNA) of a second organism species. In some embodiments, the first and second snRNAs may be different. In some embodiments, the first and second snRNAs may be the same. In some embodiments, the first and second organism species may be different. In some embodiments, the first and second organism species may be the same. Described herein, in some embodiments, is a nucleic acid system comprised of a regulatory sequence operably coupled to a transcribable region of a nucleic acid, with the regulatory sequence comprised of a proximal regulatory sequence element (PSE) and a distal regulatory sequence element (DSE), wherein the PSE is comprised of a PSE sequence of a first small nuclear RNA (snRNA) of a first organism species, wherein the DSE is comprised of a DSE sequence of a second small nuclear RNA (snRNA) of a second organism species, and wherein the first and second snRNAs are different or wherein the first and second organism species are different.

[0220] In some embodiments, the first snRNA may be a snRNA U1. In some embodiments, the first snRNA may be a snRNA U2. In some embodiments, the first snRNA may be a snRNA U3. In some embodiments, the first snRNA may be a snRNA U4. In some embodiments, the first snRNA may be a snRNA U5. In some embodiments, the first snRNA may be a snRNA U6. In some embodiments, the first snRNA may be a snRNA U7. In some embodiments, the first snRNA may be a snRNA U11. In some embodiments, the first snRNA may be a snRNA U12. In some embodiments, the first snRNA may be a snRNA 7SK. In some embodiments, the first snRNA is selected from the group consisting of snRNA U1, snRNA U2, snRNA U3, snRNA U4, snRNA U5, snRNA U6 snRNA U7, snRNA U11 and snRNA 7SK. In some embodiments, the first snRNA is selected from the group consisting of snRNA UI, snRNA U2, snRNA U3, snRNA U4, snRNA U5, snRNA U6 snRNA U7, snRNA U11, snRNA U12 and snRNA 7SK.

[0221] In some embodiments, the second snRNA may be a snRNA U1. In some embodiments, the second snRNA may be a snRNA U2. In some embodiments, the second snRNA may be a snRNA U3. In some embodiments, the second snRNA may be a snRNA U4. In some embodiments, the second snRNA may be a snRNA U5. In some embodiments, the second snRNA may be a snRNA U6. In some embodiments, the second snRNA may be a snRNA U7. In some embodiments, the second snRNA may be a snRNA U11. In some embodiments, the second snRNA may be a snRNA U12. In some embodiments, the second snRNA may be a snRNA 7SK. In some embodiments, the second snRNA is selected from the group consisting of snRNA U1, snRNA U2, snRNA U3, snRNA U4, snRNA U5, snRNA U6 snRNA U7, snRNA U11 and snRNA 7SK. In some embodiments, the second snRNA is selected from the group consisting of snRNA U1, snRNA U2, snRNA U3, snRNA U4, snRNA U5, snRNA U6 snRNA U7, snRNA U11, snRNA U12 and snRNA 7SK.

[0222] In some embodiments, the first organism species may be a human. In some embodiments, the first organism species may be a mouse. In some embodiments, the second organism species may be a human. In some embodiments, the second organism species may be a mouse.

[0223] Described herein, in some embodiments, are nucleic acid expression systems, comprising: a regulatory sequence operably coupled to a transcribable region of a nucleic acid, the regulatory sequence comprising a proximal regulatory sequence element (PSE) and a distal regulatory sequence element (DSE); wherein the PSE comprises a mouse U1 snRNA (“MmU1”) PSE, a mouse U2 snRNA (“MmU2”) PSE, a mouse U3 snRNA (“MmU3”) PSE, a mouse U4 snRNA (“MmU4”) PSE, a mouse U5 snRNA (“MmU5”) PSE, a mouse U6 snRNA (“MmU6”) PSE, a mouse U7 snRNA (“MmU7”) PSE, a mouse U11 snRNA (“MmU11”) PSE, a mouse U12 snRNA (“MmU12”) PSE, a mouse U7SK snRNA (“MmU7SK”) PSE, a human U1 snRNA (“HsU1”) PSE, a human U2 snRNA (“HsU2”) PSE, a human U3 snRNA (“HsU3”) PSE, a human U4 snRNA (“HsU4”) PSE, a human U5 snRNA (“HsU5”) PSE, a human U6 snRNA (“HsU6”) PSE, a human U7 snRNA (“HsU7”) PSE, a human U11 snRNA (“HsU11”) PSE, a human U12 snRNA (“HsU12”) PSE, or a human U7SK snRNA (“HsU7SK”) PSE; wherein the DSE comprises a mouse U1 snRNA (“MmU1”) DSE, a mouse U2 snRNA (“MmU2”) DSE, a mouse U3 snRNA (“MmU3”) DSE, a mouse U4 snRNA (“MmU4”) DSE, a mouse U5 snRNA (“MmU5”) DSE, a mouse U6 snRNA (“MmU6”) DSE, a mouse U7 snRNA (“MmU7”) DSE, a mouse U11 snRNA (“MmU11”) DSE, a mouse U12 snRNA (“MmU12”) DSE, a mouse U7SK snRNA (“MmU7SK”) DSE, a human U1 snRNA (“HsU1”) DSE, a human U2 snRNA (“HsU2”) DSE, a human U3 snRNA (“HsU3”) DSE, a human U4 snRNA (“HsU4”) DSE, a human U5 snRNA (“HsU5”) DSE, a human U6 snRNA (“HsU6”) DSE, a human U7 snRNA (“HsU7”) DSE, a human U11 snRNA (“HsU11”) DSE, a human U12 snRNA (“HsU12”) DSE, or a human U7SK snRNA (“HsU7SK”) DSE; and wherein the PSE and the DSE are from a different species as each other, or from a different snRNA as each other.

[0224] Described herein, in some embodiments, is a nucleic acid expression system. In some embodiments, the nucleic acid expression system may contain a regulatory sequence operably coupled to a transcribable region of a nucleic acid. In some embodiments, the regulatory sequence may include a proximal regulatory sequence element (PSE). In some embodiments, the regulatory sequence may include a distal regulatory sequence element (DSE). In some embodiments, the regulatory sequence may include a PSE and a DSE. In some embodiments, the PSE may include a mouse U7 snRNA (“Mm U7”) PSE. In some embodiments, the PSE may include a human U7 snRNA (“Hs U7”) PSE. In some embodiments, the PSE may include a mouse U1a1 (“mulal”) PSE. In some embodiments, the PSE may include a human U1-1 (“HUI” or “Hs U1-1”) PSE.

[0225] In some embodiments, the PSE comprises a MmU1 PSE. In some embodiments, the PSE comprises a MmU2 PSE. In some embodiments, the PSE comprises a MmU3 PSE. In some embodiments, the PSE comprises a MmU4 PSE. In some embodiments, the PSE comprises a MmU5 PSE. In some embodiments, the PSE comprises a MmU6 PSE. In some embodiments, the PSE comprises a MmU7 PSE. In some embodiments, the PSE comprises a MmU11 PSE. In some embodiments, the PSE comprises a MmU12 PSE. In some embodiments, the PSE comprises a MmU7SK PSE. In some embodiments, the PSE comprises a HsU1 PSE. In some embodiments, the PSE comprises a HsU2 PSE. In some embodiments, the PSE comprises a HsU3 PSE. In some embodiments, the PSE comprises a HsU4 PSE. In some embodiments, the PSE comprises a HsU5 PSE. In some embodiments, the PSE comprises a HsU6 PSE. In some embodiments, the PSE comprises a HsU7 PSE. In some embodiments, the PSE comprises a HsU11 PSE. In some embodiments, the PSE comprises a HsU12 PSE. In some embodiments, the PSE comprises a HsU7SK PSE. In some embodiments, the PSE comprises a PSE of a regulatory element in Table 8, or a variant thereof.

[0226] In some embodiments, the DSE comprises a MmU1 DSE. In some embodiments, the DSE comprises a MmU2 DSE. In some embodiments, the DSE comprises a MmU3 DSE. In some embodiments, the DSE comprises a MmU4 DSE. In some embodiments, the DSE comprises a MmU5 DSE. In some embodiments, the DSE comprises a MmU6 DSE. In some embodiments, the DSE comprises a MmU7 DSE. In some embodiments, the DSE comprises a MmU11 DSE. In some embodiments, the DSE comprises a MmU12 DSE. In some embodiments, the DSE comprises a MmU7SK DSE. In some embodiments, the DSE comprises a HsU1 DSE. In some embodiments, the DSE comprises a HsU2 DSE. In some embodiments, the DSE comprises a HsU3 DSE. In some embodiments, the DSE comprises a HsU4 DSE. In some embodiments, the DSE comprises a HsU5 DSE. In some embodiments, the DSE comprises a HsU6 DSE. In some embodiments, the DSE comprises a HsU7 DSE. In some embodiments, the DSE comprises a HsU11 DSE. In some embodiments, the DSE comprises a HsU12 DSE. In some embodiments, the DSE comprises a HsU7SK DSE. In some embodiments, the DSE comprises a PSE of a regulatory element in Table 8, or a variant thereof.

[0227] In some embodiments, the DSE may include a Mm U7 DSE. In some embodiments, the DSE may include a Hs U7 DSE. In some embodiments, the DSE may include a mulal DSE. In some embodiments, the DSE may include a HUI DSE. In some embodiments, when the PSE comprises the Mm U7 PSE, the DSE does not comprise the Mm U7 DSE. In some embodiments, when the PSE comprises the Hs U7 PSE, the DSE does not comprise the Hs U7 DSE. In some embodiments, when the PSE comprises the mulal PSE, the DSE does not comprise the mulal DSE. In some embodiments, when the PSE comprises the HUI PSE, the DSE does not comprise the HUI DSE.

[0228] Described herein, in some embodiments, is a nucleic acid system comprised of a regulatory sequence operably coupled to a transcribable region of a nucleic acid, with the regulatory sequence comprised of a proximal regulatory sequence element (PSE) and a distal regulatory sequence element (DSE), wherein the PSE is comprised of a mouse U7 snRNA (“Mm U7”) PSE, a human U7 snRNA (“Hs U7”) PSE, a mouse U1a1 (“mulal”) PSE, or a human U1-1 (“HUI” or “Hs U1-1”) PSE; and wherein the DSE is comprised of a Mm U7 DSE, a Hs U7 DSE, a mulal DSE, or a HUI DSE, wherein when the PSE comprises the Mm U7 PSE, the DSE does not comprise the Mm U7 DSE, when the PSE comprises the Hs U7 PSE, the DSE does not comprise the Hs U7 DSE, when the PSE comprises the mulal PSE, the DSE does not comprise the mulal DSE, and when the PSE comprises the HUI PSE, the DSE does not comprise the HUI DSE.

[0229] In some embodiments, the regulatory sequence may include a promoter sequence. In some embodiments, the regulatory sequence may not include a promoter sequence. In some embodiments, the regulatory sequence may include a terminator sequence. In some embodiments, the regulatory sequence may not include a terminator sequence.

[0230] Described herein, in some embodiments, are nucleic acid expression systems, comprising: a promoter sequence comprising a promoter proximal sequence element (PSE) and a promoter distal sequence element (DSE); wherein the PSE comprises a mouse U1 snRNA (“MmU1”) promoter PSE, a mouse U2 snRNA (“MmU2”) promoter PSE, a mouse U3 snRNA (“MmU3”) promoter PSE, a mouse U4 snRNA (“MmU4”) promoter PSE, a mouse U5 snRNA (“MmU5”) promoter PSE, a mouse U6 snRNA (“MmU6”) promoter PSE, a mouse U7 snRNA (“MmU7”) promoter PSE, a mouse U11 snRNA (“MmU11”) promoter PSE, a mouse U12 snRNA (“MmU12”) promoter PSE, a mouse U7SK snRNA (“MmU7SK”) promoter PSE, a human U1 snRNA (“HsU1”) promoter PSE, a human U2 snRNA (“HsU2”) promoter PSE, a human U3 snRNA (“HsU3”) promoter PSE, a human U4 snRNA (“HsU4”) promoter PSE, a human U5 snRNA (“HsU5”) promoter PSE, a human U6 snRNA (“HsU6”) promoter PSE, a human U7 snRNA (“HsU7”) promoter PSE, a human U11 snRNA (“HsU11”) promoter PSE, a human U12 snRNA (“HsU12”) promoter PSE, or a human U7SK snRNA (“HsU7SK”) promoter PSE; wherein the DSE comprises a mouse U1 snRNA (“MmU1”) promoter DSE, a mouse U2 snRNA (“MmU2”) promoter DSE, a mouse U3 snRNA (“MmU3”) promoter DSE, a mouse U4 snRNA (“MmU4”) promoter DSE, a mouse U5 snRNA (“MmU5”) promoter DSE, a mouse U6 snRNA (“MmU6”) promoter DSE, a mouse U7 snRNA (“MmU7”) promoter DSE, a mouse U11 snRNA (“MmU11”) promoter DSE, a mouse U12 snRNA (“MmU12”) promoter DSE, a mouse U7SK snRNA (“MmU7SK”) promoter DSE, a human U1 snRNA (“HsU1”) promoter DSE, a human U2 snRNA (“HsU2”) promoter DSE, a human U3 snRNA (“HsU3”) promoter DSE, a human U4 snRNA (“HsU4”) promoter DSE, a human U5 snRNA (“HsU5”) promoter DSE, a human U6 snRNA (“HsU6”) promoter DSE, a human U7 snRNA (“HsU7”) promoter DSE, a human U11 snRNA (“HsU11”) promoter DSE, a human U12 snRNA (“HsU12”) promoter DSE, or a human U7SK snRNA (“HsU7SK”) promoter DSE; and wherein the promoter PSE and the promoter DSE are from a different species as each other, or from a different snRNA as each other. In some embodiments, the promoter PSE and the promoter DSE are from a different species as each other, and from a different snRNA as each other. Some embodiments include a transcribable region operably coupled to the promoter sequence. Some embodiments include a terminator sequence 3′ to the transcribable region.

[0231] In some embodiments, the promoter PSE comprises a MmU1 promoter PSE. In some embodiments, the promoter PSE comprises a MmU2 promoter PSE. In some embodiments, the promoter PSE comprises a MmU3 promoter PSE. In some embodiments, the promoter PSE comprises a MmU4 promoter PSE. In some embodiments, the promoter PSE comprises a MmU5 promoter PSE. In some embodiments, the promoter PSE comprises a MmU6 promoter PSE. In some embodiments, the promoter PSE comprises a MmU7 promoter PSE. In some embodiments, the promoter PSE comprises a MmU11 promoter PSE. In some embodiments, the promoter PSE comprises a MmU12 promoter PSE. In some embodiments, the promoter PSE comprises a MmU7SK promoter PSE. In some embodiments, the promoter PSE comprises a HsU1 promoter PSE. In some embodiments, the promoter PSE comprises a HsU2 promoter PSE. In some embodiments, the promoter PSE comprises a HsU3 promoter PSE. In some embodiments, the promoter PSE comprises a HsU4 promoter PSE. In some embodiments, the promoter PSE comprises a HsU5 promoter PSE. In some embodiments, the promoter PSE comprises a HsU6 promoter PSE. In some embodiments, the promoter PSE comprises a HsU7 promoter PSE. In some embodiments, the promoter PSE comprises a HsU11 promoter PSE. In some embodiments, the promoter PSE comprises a HsU12 promoter PSE. In some embodiments, the promoter PSE comprises a HsU7SK promoter PSE. In some embodiments, the promoter PSE comprises a promoter PSE of a regulatory element in Table 8, or a variant thereof.

[0232] In some embodiments, the promoter DSE comprises a MmU1 promoter DSE. In some embodiments, the promoter DSE comprises a MmU2 promoter DSE. In some embodiments, the promoter DSE comprises a MmU3 promoter DSE. In some embodiments, the promoter DSE comprises a MmU4 promoter DSE. In some embodiments, the promoter DSE comprises a MmU5 promoter DSE. In some embodiments, the promoter DSE comprises a MmU6 promoter DSE. In some embodiments, the promoter DSE comprises a MmU7 promoter DSE. In some embodiments, the promoter DSE comprises a MmU11 promoter DSE. In some embodiments, the promoter DSE comprises a MmU12 promoter DSE. In some embodiments, the promoter DSE comprises a MmU7SK promoter DSE. In some embodiments, the promoter DSE comprises a HsU1 promoter DSE. In some embodiments, the promoter DSE comprises a HsU2 promoter DSE. In some embodiments, the promoter DSE comprises a HsU3 promoter DSE. In some embodiments, the promoter DSE comprises a HsU4 promoter DSE. In some embodiments, the promoter DSE comprises a HsU5 promoter DSE. In some embodiments, the promoter DSE comprises a HsU6 promoter DSE. In some embodiments, the promoter DSE comprises a HsU7 promoter DSE. In some embodiments, the promoter DSE comprises a HsU11 promoter DSE. In some embodiments, the promoter DSE comprises a HsU12 promoter DSE. In some embodiments, the promoter DSE comprises a HsU7SK promoter DSE. In some embodiments, the promoter DSE comprises a promoter DSE of a regulatory element in Table 8, or a variant thereof.

[0233] Described herein, in some embodiments, is a nucleic acid expression system. In some embodiments, the nucleic acid expression system may include a promoter sequence. In some embodiments, the promoter sequence may include a promoter proximal sequence element (PSE). In some embodiments, the promoter sequence may include a promoter distal sequence element (DSE). In some embodiments, the promoter sequence may include a PSE and DSE. In some embodiments, the promoter PSE may include a mouse U7 snRNA (“Mm U7”) promoter PSE. In some embodiments, the promoter PSE may include a human U7 snRNA (“Hs U7”) promoter PSE. In some embodiments, the promoter PSE may include a mouse U1a1 (“mulal”) promoter PSE. In some embodiments, the promoter PSE may include a human U1-1 (“HU1” or “Hs U1-1”) promoter PSE. In some embodiments, the promoter DSE may include a Mm U7 promoter DSE. In some embodiments, the promoter DSE may include a Hs U7 promoter DSE. In some embodiments, the promoter DSE may include a mulal promoter DSE. In some embodiments, the promoter DSE may include a HU1 promoter DSE. In some embodiments, when the promoter PSE comprises the Mm U7 promoter PSE, the promoter DSE does not comprise the Mm U7 promoter DSE. In some embodiments, when the promoter PSE comprises the Hs U7 promoter PSE, the promoter DSE does not comprise the Hs U7 promoter DSE. In some embodiments, when the promoter PSE comprises the mulal promoter PSE, the promoter DSE does not comprise the mulal promoter DSE. In some embodiments, when the promoter PSE comprises the HU1 promoter PSE, the promoter DSE does not comprise the HUI promoter DSE.

[0234] Described herein, in some embodiments, is a nucleic acid system comprised of a promoter sequence comprised of a promoter proximal sequence element (PSE) and a promoter distal sequence element (DSE), wherein the promoter PSE is comprised of a mouse U7 snRNA (“Mm U7”) promoter PSE, a human U7 snRNA (“Hs U7”) promoter PSE, a mouse U1a1 (“mulal”) promoter PSE, or a human U1-1 (“HU1” or “Hs U1-1”) promoter PSE; and wherein the promoter DSE is comprised of a Mm U7 promoter DSE, a Hs U7 promoter DSE, a mulal promoter DSE, or a HUI promoter DSE, wherein, when the promoter PSE comprises the Mm U7 promoter PSE, the promoter DSE does not comprise the Mm U7 promoter DSE, when the promoter PSE comprises the Hs U7 promoter PSE, the promoter DSE does not comprise the Hs U7 promoter DSE, when the promoter PSE comprises the mulal promoter PSE, the promoter DSE does not comprise the mulal promoter DSE, and when the promoter PSE comprises the HUI promoter PSE, the promoter DSE does not comprise the HUI promoter DSE.

[0235] In some embodiments, the system may further comprise a transcribable region operably coupled to the promoter sequence. In some embodiments, the system may further comprise a terminator sequence 3′ to the transcribable region. In some embodiments, the system may further comprise a transcribable region operably coupled to the promoter sequence and a terminator sequence 3′ to the transcribable region.

[0236] Described herein, in some embodiments, are nucleic acid expression systems, comprising, comprising: a terminator sequence 3′ to a transcribable region, the terminator sequence comprising a terminator proximal sequence element (PSE) and a terminator distal sequence element (DSE); wherein the PSE comprises a mouse U1 snRNA (“MmU1”) terminator PSE, a mouse U2 snRNA (“MmU2”) terminator PSE, a mouse U3 snRNA (“MmU3”) terminator PSE, a mouse U4 snRNA (“MmU4”) terminator PSE, a mouse U5 snRNA (“MmU5”) terminator PSE, a mouse U6 snRNA (“MmU6”) terminator PSE, a mouse U7 snRNA (“MmU7”) terminator PSE, a mouse U11 snRNA (“MmU11”) terminator PSE, a mouse U12 snRNA (“MmU12”) terminator PSE, a mouse U7SK snRNA (“MmU7SK”) terminator PSE, a human U1 snRNA (“HsU1”) terminator PSE, a human U2 snRNA (“HsU2”) terminator PSE, a human U3 snRNA (“HsU3”) terminator PSE, a human U4 snRNA (“HsU4”) terminator PSE, a human U5 snRNA (“HsU5”) terminator PSE, a human U6 snRNA (“HsU6”) terminator PSE, a human U7 snRNA (“HsU7”) terminator PSE, a human U11 snRNA (“HsU11”) terminator PSE, a human U12 snRNA (“HsU12”) terminator PSE, or a human U7SK snRNA (“HsU7SK”) terminator PSE; wherein the DSE comprises a mouse U1 snRNA (“MmU1”) terminator DSE, a mouse U2 snRNA (“MmU2”) terminator DSE, a mouse U3 snRNA (“MmU3”) terminator DSE, a mouse U4 snRNA (“MmU4”) terminator DSE, a mouse U5 snRNA (“MmU5”) terminator DSE, a mouse U6 snRNA (“MmU6”) terminator DSE, a mouse U7 snRNA (“MmU7”) terminator DSE, a mouse U11 snRNA (“MmU11”) terminator DSE, a mouse U12 snRNA (“MmU12”) terminator DSE, a mouse U7SK snRNA (“MmU7SK”) terminator DSE, a human U1 snRNA (“HsU1”) terminator DSE, a human U2 snRNA (“HsU2”) terminator DSE, a human U3 snRNA (“HsU3”) terminator DSE, a human U4 snRNA (“HsU4”) terminator DSE, a human U5 snRNA (“HsU5”) terminator DSE, a human U6 snRNA (“HsU6”) terminator DSE, a human U7 snRNA (“HsU7”) terminator DSE, a human U11 snRNA (“HsU11”) terminator DSE, a human U12 snRNA (“HsU12”) terminator DSE, or a human U7SK snRNA (“HsU7SK”) terminator DSE; and wherein the terminator PSE and the terminator DSE are from a different species as each other, or from a different snRNA as each other. In some embodiments, the terminator PSE and the terminator DSE are from a different species as each other, and from a different snRNA as each other. Some embodiments include a promoter sequence, wherein the transcribable region is operably coupled to the promoter sequence.

[0237] In some embodiments, the terminator PSE comprises a MmU1 terminator PSE. In some embodiments, the terminator PSE comprises a MmU2 terminator PSE. In some embodiments, the terminator PSE comprises a MmU3 terminator PSE. In some embodiments, the terminator PSE comprises a MmU4 terminator PSE. In some embodiments, the terminator PSE comprises a MmU5 terminator PSE. In some embodiments, the terminator PSE comprises a MmU6 terminator PSE. In some embodiments, the terminator PSE comprises a MmU7 terminator PSE. In some embodiments, the terminator PSE comprises a MmU11 terminator PSE. In some embodiments, the terminator PSE comprises a MmU12 terminator PSE. In some embodiments, the terminator PSE comprises a MmU7SK terminator PSE. In some embodiments, the terminator PSE comprises a HsU1 terminator PSE. In some embodiments, the terminator PSE comprises a HsU2 terminator PSE. In some embodiments, the terminator PSE comprises a HsU3 terminator PSE. In some embodiments, the terminator PSE comprises a HsU4 terminator PSE. In some embodiments, the terminator PSE comprises a HsU5 terminator PSE. In some embodiments, the terminator PSE comprises a HsU6 terminator PSE. In some embodiments, the terminator PSE comprises a HsU7 terminator PSE. In some embodiments, the terminator PSE comprises a HsU11 terminator PSE. In some embodiments, the terminator PSE comprises a HsU12 terminator PSE. In some embodiments, the terminator PSE comprises a HsU7SK terminator PSE. In some embodiments, the terminator PSE comprises a terminator PSE of a regulatory element in Table 8, or a variant thereof.

[0238] In some embodiments, the terminator DSE comprises a MmU1 terminator DSE. In some embodiments, the terminator DSE comprises a MmU2 terminator DSE. In some embodiments, the terminator DSE comprises a MmU3 terminator DSE. In some embodiments, the terminator DSE comprises a MmU4 terminator DSE. In some embodiments, the terminator DSE comprises a MmU5 terminator DSE. In some embodiments, the terminator DSE comprises a MmU6 terminator DSE. In some embodiments, the terminator DSE comprises a MmU7 terminator DSE. In some embodiments, the terminator DSE comprises a MmU1l terminator DSE. In some embodiments, the terminator DSE comprises a MmU12 terminator DSE. In some embodiments, the terminator DSE comprises a MmU7SK terminator DSE. In some embodiments, the terminator DSE comprises a HsU1 terminator DSE. In some embodiments, the terminator DSE comprises a HsU2 terminator DSE. In some embodiments, the terminator DSE comprises a HsU3 terminator DSE. In some embodiments, the terminator DSE comprises a HsU4 terminator DSE. In some embodiments, the terminator DSE comprises a HsU5 terminator DSE. In some embodiments, the terminator DSE comprises a HsU6 terminator DSE. In some embodiments, the terminator DSE comprises a HsU7 terminator DSE. In some embodiments, the terminator DSE comprises a HsU11 terminator DSE. In some embodiments, the terminator DSE comprises a HsU12 terminator DSE. In some embodiments, the terminator DSE comprises a HsU7SK terminator DSE. In some embodiments, the terminator DSE comprises a terminator DSE of a regulatory element in Table 8, or a variant thereof.

[0239] Described herein, in some embodiments, is a nucleic acid expression system. In some embodiments, the nucleic acid expression system may include a terminator sequence 3′ to a transcribable region. In some embodiments, the terminator sequence may include a terminator proximal sequence element (PSE). In some embodiments, the terminator sequence may include a terminator distal sequence element (DSE). In some embodiments, the terminator sequence may include a terminator PSE and a terminator DSE. In some embodiments, the terminator PSE may include a mouse U7 snRNA (“Mm U7”) terminator PSE. In some embodiments, the terminator PSE may include a human U7 snRNA (“Hs U7”) terminator PSE. In some embodiments, the terminator PSE may include a mouse U1a1 (“mulal”) terminator PSE. In some embodiments, the terminator PSE may include a human U1-1 (“HUI” or “Hs U1-1”) terminator PSE. In some embodiments, the terminator DSE may include a Mm U7 terminator DSE. In some embodiments, the terminator DSE may include a Hs U7 terminator DSE. In some embodiments, the terminator DSE may include a mulal terminator DSE. In some embodiments, the terminator DSE may include a HU1 terminator DSE. In some embodiments, when the terminator PSE comprises the Mm U7 terminator PSE, the terminator DSE does not comprise the Mm U7 terminator DSE. In some embodiments, when the terminator PSE comprises the Hs U7 terminator PSE, the terminator DSE does not comprise the Hs U7 terminator DSE. In some embodiments, when the terminator PSE comprises the mulal terminator PSE, the terminator DSE does not comprise the mulal terminator DSE. In some embodiments, when the terminator PSE comprises the HU1 terminator PSE, the terminator DSE does not comprise the HUI terminator DSE. In some embodiments, the nucleic acid expression system may include a promoter sequence. In some embodiments, the promoter sequence may include the transcribable region operably coupled to the promoter sequence.

[0240] Described herein, in some embodiments, is a nucleic acid system comprised of a terminator sequence 3′ to a transcribable region, the terminator sequence comprised of a terminator proximal sequence element (PSE) and a terminator distal sequence element (DSE), wherein, the terminator PSE is comprised of a mouse U7 snRNA (“Mm U7”) terminator PSE, a human U7 snRNA (“Hs U7”) terminator PSE, a mouse U1a1 (“mulal”) terminator PSE, or a human U1-1 (“HUI” or “Hs U1-1”) terminator PSE; and wherein, the terminator DSE is comprised of a Mm U7 terminator DSE, a Hs U7 terminator DSE, a mulal terminator DSE, or a HUI terminator DSE, wherein, when the terminator PSE comprises the Mm U7 terminator PSE, the terminator DSE does not comprise the Mm U7 terminator DSE, when the terminator PSE comprises the Hs U7 terminator PSE, the terminator DSE does not comprise the Hs U7 terminator DSE, when the terminator PSE comprises the mulal terminator PSE, the terminator DSE does not comprise the mulal terminator DSE, and when the terminator PSE comprises the HUI terminator PSE, the terminator DSE does not comprise the HUI terminator DSE.

[0241] Described herein, in some embodiments, is a nucleic acid expression system. In some embodiments, the nucleic acid expression system may include a promoter sequence operably coupled to a transcribable region of a nucleic acid. In some embodiments, the nucleic acid expression system may include a terminator sequence coupled to the transcribable region. In some embodiments, the nucleic acid expression system may include a promoter sequence operably coupled to a transcribable region of a nucleic acid and a terminator sequence coupled to the transcribable region. In some embodiments, the promoter may include a first small nuclear RNA (snRNA) of a first organism species. In some embodiments, the terminator sequence may include a terminator sequence of a second small nuclear RNA (snRNA) of a second organism species. In some embodiments, the first and second snRNAs are different. In some embodiments, the first and second snRNAs are the same. In some embodiments, the first and second organism species are different. In some embodiments, the first and second organism species are the same.

[0242] Described herein, in some embodiments, is a nucleic acid system comprised of a promoter sequence operably coupled to a transcribable region of a nucleic acid, and a terminator sequence coupled to the transcribable region; wherein the promoter sequence is comprised of a promoter sequence of a first small nuclear RNA (snRNA) of a first organism species, wherein the terminator sequence is comprised of a terminator sequence of a second small nuclear RNA (snRNA) of a second organism species, and wherein the first and second snRNAs are different or wherein the first and second organism species are different.

[0243] In some embodiments, the first snRNA may be a snRNA U1. In some embodiments, the first snRNA may be a snRNA U2. In some embodiments, the first snRNA may be a snRNA U3. In some embodiments, the first snRNA may be a snRNA U4. In some embodiments, the first snRNA may be a snRNA U5. In some embodiments, the first snRNA may be a snRNA U6. In some embodiments, the first snRNA may be a snRNA U7. In some embodiments, the first snRNA may be a snRNA U11. In some embodiments, the first snRNA may be a snRNA U12. In some embodiments, the first snRNA may be a snRNA 7SK. In some embodiments, the first snRNA is selected from the group consisting of snRNA UI, snRNA U2, snRNA U3, snRNA U4, snRNA U5, snRNA U6 snRNA U7, snRNA U11 and snRNA 7SK. In some embodiments, the first snRNA is selected from the group consisting of snRNA U1, snRNA U2, snRNA U3, snRNA U4, snRNA U5, snRNA U6 snRNA U7, snRNA U11, snRNA U12 and snRNA 7SK.

[0244] In some embodiments, the second snRNA may be a snRNA U1. In some embodiments, the second snRNA may be a snRNA U2. In some embodiments, the second snRNA may be a snRNA U3. In some embodiments, the second snRNA may be a snRNA U4. In some embodiments, the second snRNA may be a snRNA U5. In some embodiments, the second snRNA may be a snRNA U6. In some embodiments, the second snRNA may be a snRNA U7. In some embodiments, the second snRNA may be a snRNA U11. In some embodiments, the second snRNA may be a snRNA U12. In some embodiments, the second snRNA may be a snRNA 7SK. In some embodiments, the second snRNA is selected from the group consisting of snRNA U1, snRNA U2, snRNA U3, snRNA U4, snRNA U5, snRNA U6 snRNA U7, snRNA U11 and snRNA 7SK. In some embodiments, the second snRNA is selected from the group consisting of snRNA U1, snRNA U2, snRNA U3, snRNA U4, snRNA U5, snRNA U6 snRNA U7, snRNA U11, snRNA U12 and snRNA 7SK.

[0245] In some embodiments, the first organism species may be a human. In some embodiments, the first organism species may be a mouse. In some embodiments, the second organism species may be a human. In some embodiments, the second organism species may be a mouse.

[0246] Described herein, in some embodiments, are nucleic acid expression systems, comprising, comprising: a promoter sequence operably coupled to a transcribable region of a nucleic acid, and a terminator sequence coupled to the transcribable region; wherein the promoter sequence comprises a promoter sequence of a first small nuclear RNA (snRNA) of a first organism species, wherein the terminator sequence comprises a terminator sequence of a second small nuclear RNA (snRNA) of a second organism species, and wherein the first and second snRNAs are different or wherein the first and second organism species are different. In some embodiments, the first snRNA is selected from the group consisting of snRNA U1, snRNA U2, snRNA U3, snRNA U4, snRNA U5, snRNA U6, snRNA U7, snRNA U11, snRNA U12 and snRNA 7SK. In some embodiments, the second snRNA is selected from the group consisting of snRNA U7, snRNA U2, snRNA U3, snRNA U4, snRNA U5, snRNA U6, snRNA U1, snRNA U11, snRNA U12 and snRNA 7SK. In some embodiments, the first snRNA is selected from the group consisting of snRNA U1, snRNA U2, snRNA U3, snRNA U4, snRNA U5, snRNA U6, snRNA U7, snRNA U11, snRNA U12 and snRNA 7SK; the second snRNA is selected from the group consisting of snRNA U7, snRNA U2, snRNA U3, snRNA U4, snRNA U5, snRNA U6, snRNA U1, snRNA U11, snRNA U12 and snRNA 7SK; the first organism species is selected from the group consisting of human and mouse; and the second organism species is selected from the group consisting of mouse and human. In some embodiments, the promoter comprises a promoter PSE sequence and a promoter DSE sequence, and wherein the either the promoter PSE or the promoter DSE is of a different organism species than the first organism species. In some embodiments, the promoter comprises a promoter PSE sequence and a promoter DSE sequence, and wherein the either the promoter PSE or the promoter DSE is of a different snRNA than the first snRNA. In some embodiments, the promoter comprises a promoter PSE sequence and a promoter DSE sequence, and wherein the either the promoter PSE or the promoter DSE is of a different organism species than the first organism species; and wherein the promoter comprises a promoter PSE sequence and a promoter DSE sequence, and wherein the either the promoter PSE or the promoter DSE is of a different snRNA than the first snRNA. In some embodiments, the terminator comprises a terminator PSE sequence and a terminator DSE sequence, and wherein the either the terminator PSE or the terminator DSE is of a different organism species than the second organism species. In some embodiments, the terminator comprises a terminator PSE sequence and a terminator DSE sequence, and wherein the either the terminator PSE or the terminator DSE is of a different snRNA than the second snRNA. In some embodiments, the terminator comprises a terminator PSE sequence and a terminator DSE sequence, and wherein the either the terminator PSE or the terminator DSE is of a different organism species than the second organism species; and wherein the terminator comprises a terminator PSE sequence and a terminator DSE sequence, and wherein the either the terminator PSE or the terminator DSE is of a different snRNA than the second snRNA. In some embodiments, the promoter comprises a promoter PSE sequence and a promoter DSE sequence, and wherein the either the promoter PSE or the promoter DSE is of a different organism species than the first organism species; and wherein the promoter comprises a promoter PSE sequence and a promoter DSE sequence, and wherein the either the promoter PSE or the promoter DSE is of a different snRNA than the first snRNA; wherein the terminator comprises a terminator PSE sequence and a terminator DSE sequence, and wherein the either the terminator PSE or the terminator DSE is of a different organism species than the second organism species; and wherein the terminator comprises a terminator PSE sequence and a terminator DSE sequence, and wherein the either the terminator PSE or the terminator DSE is of a different snRNA than the second snRNA. In some embodiments, the promoter sequence comprises a promoter sequence in Table 8, or a variant thereof. In some embodiments, the terminator sequence comprises a terminator sequence in Table 8, or a variant thereof. In some embodiments, the promoter DSE or promoter PSE comprises a promoter DSE or promoter PSE of a promoter in Table 8, or a variant thereof. In some embodiments, the terminator DSE or terminator PSE comprises a terminator DSE or terminator PSE of a terminator in Table 8, or a variant thereof.

[0247] Described herein, in some embodiments, are nucleic acid expression systems, comprising: a promoter sequence comprising a mouse U1 snRNA (“MmU1”) promoter sequence, a mouse U2 snRNA (“MmU2”) promoter sequence, a mouse U3 snRNA (“MmU3”) promoter sequence, a mouse U4 snRNA (“MmU4”) promoter sequence, a mouse U5 snRNA (“MmU5”) promoter sequence, a mouse U6 snRNA (“MmU6”) promoter sequence, a mouse U7 snRNA (“MmU7”) promoter sequence, a mouse U11 snRNA (“MmU11”) promoter sequence, a mouse U12 snRNA (“MmU12”) promoter sequence, a mouse U7SK snRNA (“MmU7SK”) promoter sequence, a human U1 snRNA (“HsU1”) promoter sequence, a human U2 snRNA (“HsU2”) promoter sequence, a human U3 snRNA (“HsU3”) promoter sequence, a human U4 snRNA (“HsU4”) promoter sequence, a human U5 snRNA (“HsU5”) promoter sequence, a human U6 snRNA (“HsU6”) promoter sequence, a human U7 snRNA (“HsU7”) promoter sequence, a human U11 snRNA (“HsU11”) promoter sequence, a human U12 snRNA (“HsU12”) promoter sequence, or a human U7SK snRNA (“HsU7SK”) promoter sequence, or a fragment or combination of fragments thereof; and a transcribable region operably coupled to the promoter sequence and to a terminator sequence comprising a mouse U1 snRNA (“MmU1”) terminator sequence, a mouse U2 snRNA (“MmU2”) terminator sequence, a mouse U3 snRNA (“MmU3”) terminator sequence, a mouse U4 snRNA (“MmU4”) terminator sequence, a mouse U5 snRNA (“MmU5”) terminator sequence, a mouse U6 snRNA (“MmU6”) terminator sequence, a mouse U7 snRNA (“MmU7”) terminator sequence, a mouse U11 snRNA (“MmU11”) terminator sequence, a mouse U12 snRNA (“MmU12”) terminator sequence, a mouse U7SK snRNA (“MmU7SK”) terminator sequence, a human U1 snRNA (“HsU1”) terminator sequence, a human U2 snRNA (“HsU2”) terminator sequence, a human U3 snRNA (“HsU3”) terminator sequence, a human U4 snRNA (“HsU4”) terminator sequence, a human U5 snRNA (“HsU5”) terminator sequence, a human U6 snRNA (“HsU6”) terminator sequence, a human U7 snRNA (“HsU7”) terminator sequence, a human U11 snRNA (“HsU11”) terminator sequence, a human U12 snRNA (“HsU12”) terminator sequence, or a human U7SK snRNA (“HsU7SK”) terminator sequence, or a fragment or combination of fragments thereof; wherein the promoter sequence and the terminator sequence are at least partially of a different organism species as each other, or are at least partially of a different snRNA as each other. In some embodiments, the promoter sequence and the terminator sequence are at least partially of a different organism species as each other, and are at least partially of a different snRNA as each other. In some embodiments, the promoter comprises a promoter PSE sequence and a promoter DSE sequence, and wherein the either the promoter PSE or the promoter DSE is of a different organism species than the first organism species. In some embodiments, the promoter comprises a promoter PSE sequence and a promoter DSE sequence, and wherein the either the promoter PSE or the promoter DSE is of a different snRNA than the first snRNA. In some embodiments, the promoter comprises a promoter PSE sequence and a promoter DSE sequence, and wherein the either the promoter PSE or the promoter DSE is of a different organism species than the first organism species; and wherein the promoter comprises a promoter PSE sequence and a promoter DSE sequence, and wherein the either the promoter PSE or the promoter DSE is of a different snRNA than the first snRNA. In some embodiments, the terminator comprises a terminator PSE sequence and a terminator DSE sequence, and wherein the either the terminator PSE or the terminator DSE is of a different organism species than the second organism species. In some embodiments, the terminator comprises a terminator PSE sequence and a terminator DSE sequence, and wherein the either the terminator PSE or the terminator DSE is of a different snRNA than the second snRNA. In some embodiments, the terminator comprises a terminator PSE sequence and a terminator DSE sequence, and wherein the either the terminator PSE or the terminator DSE is of a different organism species than the second organism species; and wherein the terminator comprises a terminator PSE sequence and a terminator DSE sequence, and wherein the either the terminator PSE or the terminator DSE is of a different snRNA than the second snRNA. In some embodiments, the promoter comprises a promoter PSE sequence and a promoter DSE sequence, and wherein the either the promoter PSE or the promoter DSE is of a different organism species than the first organism species; and wherein the promoter comprises a promoter PSE sequence and a promoter DSE sequence, and wherein the either the promoter PSE or the promoter DSE is of a different snRNA than the first snRNA; wherein the terminator comprises a terminator PSE sequence and a terminator DSE sequence, and wherein the either the terminator PSE or the terminator DSE is of a different organism species than the second organism species; and wherein the terminator comprises a terminator PSE sequence and a terminator DSE sequence, and wherein the either the terminator PSE or the terminator DSE is of a different snRNA than the second snRNA. In some embodiments, the promoter sequence comprises a promoter sequence in Table 8, or a variant thereof. In some embodiments, the terminator sequence comprises a terminator sequence in Table 8, or a variant thereof. In some embodiments, the promoter DSE or promoter PSE comprises a promoter DSE or promoter PSE of a promoter in Table 8, or a variant thereof. In some embodiments, the terminator DSE or terminator PSE comprises a terminator DSE or terminator PSE of a terminator in Table 8, or a variant thereof.

[0248] Described herein, in some embodiments, is a nucleic acid expression system. In some embodiments, the nucleic acid expression system may include a promoter sequence. In some embodiments, the promoter sequence may include a mouse U7 snRNA (“Mm U7”) promoter sequence. In some embodiments, the promoter sequence may include a human U7 snRNA (“Hs U7”) promoter sequence. In some embodiments, the promoter sequence may include a mouse U1a1 (“mulal”) promoter sequence. In some embodiments, the promoter sequence may include a human U1-1 (“HU1” or “Hs U1-1”) promoter sequence. In some embodiments, the promoter sequence may include a fragment of the promoters listed above. In some embodiments, the promoter sequence may include a combination of fragments listed above. In some embodiments, the nucleic acid expression system may include a transcribable region operably coupled to the promoter sequence. In some embodiments, the nucleic acid expression system may include a transcribable region operably coupled to a terminator sequence. In some embodiments, the nucleic acid expression system may include a transcribable region operably coupled to the promoter sequence and a terminator sequence. In some embodiments, the terminator sequence may include a Mm U7 terminator sequence. In some embodiments, the terminator sequence may include a Hs U7 terminator sequence. In some embodiments, the terminator sequence may include a mulal terminator sequence. In some embodiments, the terminator sequence may include a HUI terminator sequence. In some embodiments, the terminator sequence may include a fragment of the terminators listed above. In some embodiments, the terminator sequence may include a combination of fragments of the terminators listed above. In some embodiments, when the promoter sequence comprises the Mm U7 promoter sequence or a fragment thereof, the terminator sequence does not comprise the Mm U7 terminator sequence or a fragment thereof. In some embodiments, when the promoter sequence comprises the Hs U7 promoter sequence or a fragment thereof, the terminator sequence does not comprise the Hs U7 terminator sequence or a fragment thereof. In some embodiments, when the promoter sequence comprises the mulal promoter sequence or a fragment thereof, the terminator sequence does not comprise the mulal terminator sequence or a fragment thereof. In some embodiments, when the promoter sequence comprises the HUI promoter sequence or a fragment thereof, the terminator sequence does not comprise the HU1 terminator sequence or a fragment thereof.

[0249] Described herein, in some embodiments, is a nucleic acid system comprised of a promoter sequence comprised of a mouse U7 snRNA (“Mm U7”) promoter sequence, a human U7 snRNA (“Hs U7”) promoter sequence, a mouse U1a1 (“mulal”) promoter sequence, or a human U1-1 (“HUI” or “Hs U1-1”) promoter sequence, or a fragment or combination of fragments thereof; and a transcribable region operably coupled to the promoter sequence and to a terminator sequence comprised of a Mm U7 terminator sequence, a Hs U7 terminator sequence, a mulal terminator sequence, or a HUI terminator sequence, or a fragment or combination of fragments thereof, wherein: when the promoter sequence comprises the Mm U7 promoter sequence or a fragment thereof, the terminator sequence does not comprise the Mm U7 terminator sequence or a fragment thereof, when the promoter sequence comprises the Hs U7 promoter sequence or a fragment thereof, the terminator sequence does not comprise the Hs U7 terminator sequence or a fragment thereof, when the promoter sequence comprises the mulal promoter sequence or a fragment thereof, the terminator sequence does not comprise the mulal terminator sequence or a fragment thereof, and when the promoter sequence comprises the HUI promoter sequence or a fragment thereof, the terminator sequence does not comprise the HUI terminator sequence or a fragment thereof.

[0250] Described herein, in some embodiments, is a method of producing a ribonucleic acid (RNA). In some embodiments, the method comprises contacting a cell with an expression system. In some embodiments, the expression system is a virus. In some embodiments, the virus is an adeno-associated virus (AAV). In some embodiments, the expression system may include a regulatory sequence operably coupled to a transcribable region of a nucleic acid. In some embodiments, the regulatory sequence may include a proximal regulatory sequence element (PSE). In some embodiments, the regulatory sequence may include a distal regulatory sequence element (DSE). In some embodiments, the regulatory sequence may include a PSE and a DSE. In some embodiments, the PSE may include a mouse U7 snRNA (“Mm U7”) PSE. In some embodiments, the PSE may include a human U7 snRNA (“Hs U7”) PSE. In some embodiments, the PSE may include a mouse U1a1 (“mulal”) PSE. In some embodiments, the PSE may include a human U1-1 (“HUI” or “Hs U1-1”) PSE. In some embodiments, the DSE may include a Mm U7 DSE. In some embodiments, the DSE may include a Hs U7 DSE. In some embodiments, the DSE may include a mulal DSE. In some embodiments, the DSE may include a HUI DSE. In some embodiments, when the PSE comprises the Mm U7 PSE, the DSE does not comprise the Mm U7 DSE. In some embodiments, when the PSE comprises the Hs U7 PSE, the DSE does not comprise the Hs U7 DSE. In some embodiments, when the PSE comprises the mulal PSE, the DSE does not comprise the mulal DSE. In some embodiments, when the PSE comprises the HU1 PSE, the DSE does not comprise the HUI DSE. In some embodiments, the regulatory sequence may include a promoter sequence. In some embodiments, the regulatory sequence may include a terminator sequence. In some embodiments, the regulatory sequence may include a promoter sequence and a terminator sequence.

[0251] Described herein, in some embodiments, is a method for producing a ribonucleic acid (RNA), comprised of contacting a cell with an expression system comprised of a regulatory sequence operably coupled to a transcribable region of a nucleic acid, the regulatory sequence comprised of a proximal regulatory sequence element (PSE) and a distal regulatory sequence element (DSE); wherein the PSE is comprised of a mouse U7 snRNA (“Mm U7”) PSE, a human U7 snRNA (“Hs U7”) PSE, a mouse U1a1 (“mulal”) PSE, or a human U1-1 (“HUI” or “Hs U1-1”) PSE; and wherein the PSE is comprised of a Mm U7 DSE, a Hs U7 DSE, a mulal DSE, or a HUI DSE, wherein: when the PSE comprises the Mm U7 PSE, the DSE does not comprise the Mm U7 DSE, when the PSE comprises the Hs U7 PSE, the DSE does not comprise the Hs U7 DSE, when the PSE comprises the mulal PSE, the DSE does not comprise the mulal DSE, and when the PSE comprises the HUI PSE, the DSE does not comprise the HUI DSE.

[0252] Described herein, in some embodiments, is a nucleic system. In some embodiments, the nucleic acid system may include a transcribable region. In some embodiments, the transcribable region may include an exonic splicing silencer (ESS) nucleic acid sequence. In some embodiments, the transcribable region may include an exonic splicing enhancer (ESE) nucleic acid sequence. In some embodiments, the transcribable region may include a antisense nucleic acid sequence. In some embodiments, the antisense nucleic acid sequence may be targeting a target ribonucleic acid (RNA). In some embodiments, the transcribable region may include a nucleic acid coding sequence (CDS).

[0253] In some embodiments, the nucleic acid expression system may produce a greater amount of RNA from the transcribable region than an expression system having a wild-type promoter sequence operably coupled to the transcribable region. In some embodiments, the nucleic acid expression system may produce a greater amount of RNA from the transcribable region than an expression system having a wild-type terminator sequence 3′ to the transcribable region. In some embodiments, the amount of RNA produced is at least 1% greater. In some embodiments, the amount of RNA produced is at least 2% greater. In some embodiments, the amount of RNA produced is at least 3% greater. In some embodiments, the amount of RNA produced is at least 4% greater. In some embodiments, the amount of RNA produced is at least 5% greater. In some embodiments, the amount of RNA produced is at least 10% greater. In some embodiments, the amount of RNA produced is at least 20% greater. In some embodiments, the amount of RNA produced is at least 30% greater. In some embodiments, the amount of RNA produced is at least 40% greater. In some embodiments, the amount of RNA produced is at least 50% greater. In some embodiments, the amount of RNA produced is at least 60% greater. In some embodiments, the amount of RNA produced is at least 70% greater. In some embodiments, the amount of RNA produced is at least 80% greater. In some embodiments, the amount of RNA produced is at least 90% greater. In some embodiments, the amount of RNA produced is at least 100% greater. In some embodiments, the amount of RNA produced is at least 150% greater. In some embodiments, the amount of RNA produced is at least 200% greater. In some embodiments, the amount of RNA produced is at least 250% greater. In some embodiments, the amount of RNA produced is at least 300% greater. In some embodiments, the amount of RNA produced is at least 350% greater. In some embodiments, the amount of RNA produced is at least 400% greater. In some embodiments, the amount of RNA produced is at least 450% greater. In some embodiments, the amount of RNA produced is at least 500% greater.

[0254] In some embodiments, the expression system may produce RNA from the transcribable region at a greater rate than an expression system having a wild-type promoter sequence operably coupled to the transcribable region. In some embodiments, the expression system may produce RNA from the transcribable region at a greater rate than an expression system having a wild-type terminator sequence 3′ to the transcribable region. In some embodiments, the greater rate of RNA produced is at least 1% greater. In some embodiments, the greater rate of RNA produced is at least 2% greater. In some embodiments, the greater rate of RNA produced is at least 3% greater. In some embodiments, the greater rate of RNA produced is at least 4% greater. In some embodiments, the greater rate of RNA produced is at least 5% greater. In some embodiments, the greater rate of RNA produced is at least 10% greater. In some embodiments, the greater rate of RNA produced is at least 20% greater. In some embodiments, the greater rate of RNA produced is at least 30% greater. In some embodiments, the greater rate of RNA produced is at least 40% greater. In some embodiments, the greater rate of RNA produced is at least 50% greater. In some embodiments, the greater rate of RNA produced is at least 60% greater. In some embodiments, the greater rate of RNA produced is at least 70% greater. In some embodiments, the greater rate of RNA produced is at least 80% greater. In some embodiments, the greater rate of RNA produced is at least 90% greater. In some embodiments, the greater rate of RNA produced is at least 100% greater. In some embodiments, the greater rate of RNA produced is at least 150% greater. In some embodiments, the greater rate of RNA produced is at least 200% greater. In some embodiments, the greater rate of RNA produced is at least 250% greater. In some embodiments, the greater rate of RNA produced is at least 300% greater. In some embodiments, the greater rate of RNA produced is at least 350% greater. In some embodiments, the greater rate of RNA produced is at least 400% greater. In some embodiments, the greater rate of RNA produced is at least 450% greater. In some embodiments, the greater rate of RNA produced is at least 500% greater.

### Expression Construct

[0255] In an aspect is provided an expression cassette (e.g. expression vector) including the system provided herein including embodiments thereof. In embodiments, the expression cassette is a viral vector or a plasmid. In embodiments, the expression cassette is a viral vector. Expression cassettes contemplated to include, but are not limited to, viral vectors based on various viral sequences as well as those contemplated for eukaryotic target cells or prokaryotic target cells. The “target cells” may refer to the cells where the expression vector is transfected and the nucleotide sequence encoding the protein is expressed. In embodiments, the target cells are neural cells.

[0256] In embodiments, the system includes one or more deoxyribonucleic acid (DNA) molecules including the synthesis module and the silencing module.

[0257] In embodiments, the system includes an expression cassette. In embodiments, the expression cassette encodes the synthesis module and the silencing module. In embodiments, the expression cassette encodes the synthesis module. In embodiments, the expression cassette encodes the silencing module.

[0258] In embodiments, the synthesis module is upstream or 5′ relative to the silencing module. In embodiments, the synthesis module is downstream or 3′ relative to the silencing module.

[0259] Described herein, in some embodiments, are expression constructs. An expression construct may include an expression cassette. The expression construct may be DNA. The expression construct may encode an RNA system described herein. The expression construct may encode an RNA such as a modified U7 snRNA that targets a target such as MECP2, or may include or encode a target coding sequence such as a target (e.g. MECP2) coding sequence. The expression construct may encode an ESS sequence, a U7 targeting sequence, a Sm binding site, or a U7 3′ hairpin, or a combination thereof. For example, an expression construct may encode an ESS sequence, a U7 targeting sequence, a Sm binding site, and a U7 3′ hairpin, which may be operably connected to a promoter within the expression construct. The expression construct may include a target (e.g. MECP2) coding sequence, which may be operably connected to a promoter (e.g. a different promoter). The expression construct may be or include a viral vector. The expression construct may be included in a composition herein. The expression construct may be included in a virus or viral delivery agent.

[0260] In some embodiments, the system may include an expression cassette. In some embodiments, the expression cassette may include a promoter. In some embodiments, the expression cassette may encode an exonic splicing sequence. In some embodiments, the expression cassette may encode a U7 targeting sequence. In some embodiments, the expression cassette may encode a smOPT sequence. In some embodiments, the expression cassette may encode a U7 3′ hairpin structure. In some embodiments, the expression cassette may include a 3′ terminator sequence. In some embodiments, the expression cassette may include or encode a combination of two or more, or all of the following: a promoter, an exonic splicing sequence, a U7 targeting sequence that targets a target (e.g. MECP2) mRNA, a smOPT, a U7 3′ hairpin structure, and a 3′ terminator sequence.

[0261] In some embodiments, an expression cassette may include a promoter. In some embodiments, the expression cassette may include a target (e.g. MECP2) coding sequence. In some embodiments, the expression cassette may include a 3′ terminator sequence. In some embodiments, the expression cassette may include or encode a combination of two or more, or all of the following: a promoter, a target (e.g. MECP2) coding sequence, and a 3′ terminator sequence. An expression construct may include multiple expression cassettes.

[0262] Some embodiments include an arrayed series of modified U7 snRNAs. In some embodiments, the array includes multiple U7 modules. Each module may encode a targeting sequence. The targeting sequences of multiple modules may be the same as each other. The targeting sequences of some modules may be different from each other.

[0263] An expression construct may encode multiple engineered or modified snRNAs. For example, an expression construct may encode 1, 2, 3, 4, 5, 6, 7, 8, 9, or 10 copies of a recombinant U7 snRNA. In some embodiments, the expression construct encodes 1 copy of a recombinant U7 snRNA. In some embodiments, the expression construct encodes 2 copies of the recombinant U7 snRNA. In some embodiments, the expression construct encodes 3 copies of the recombinant U7 snRNA. In some embodiments, the expression construct encodes 4 copies of the recombinant U7 snRNA. In some embodiments, the expression construct encodes 5 copies of the recombinant U7 snRNA. In some embodiments, the expression construct encodes 6 copies of the recombinant U7 snRNA. In some embodiments, the expression construct encodes 7 copies of the recombinant U7 snRNA. In some embodiments, the expression construct encodes 8 copies of the recombinant U7 snRNA. In some embodiments, the expression construct encodes 9 copies of the recombinant U7 snRNA. In some embodiments, the expression construct encodes 10 copies of the recombinant U7 snRNA. In some embodiments, all 1, 2, 3, 4, 5, 6, 7, 8, 9, or 10 copies of a recombinant U7 snRNA sequence are operably linked to one or more promoters. For example, multiple copies of the recombinant U7 snRNA sequence may be operably linked to a single promoter. In some embodiments, all 1, 2, 3, 4, 5, 6, 7, 8, 9, or 10 copies of a recombinant U7 snRNA sequence are operably linked to one or more 3′ terminator sequences.

[0264] Some embodiments include an arrayed series of a target (e.g. MECP2) coding sequences. In some embodiments, the array includes multiple target coding sequences. Each module may encode a target coding sequence. The target coding sequences of multiple modules may be the same as each other. The target coding sequences of some modules may be different.

[0265] An expression construct may encode or include multiple coding sequences. For example, an expression construct may include 1, 2, 3, 4, 5, 6, 7, 8, 9, or 10 copies of a target (e.g. MECP2) coding sequence. In some embodiments, the expression construct includes 1 copy of a target coding sequence. In some embodiments, the expression construct includes 2 copies of the target coding sequence. In some embodiments, the expression construct includes 3 copies of the target coding sequence. In some embodiments, the expression construct includes 4 copies of the target coding sequence. In some embodiments, the expression construct includes 5 copies of the target coding sequence. In some embodiments, the expression construct includes 6 copies of the target coding sequence. In some embodiments, the expression construct includes 7 copies of the target coding sequence. In some embodiments, the expression construct includes 8 copies of the target coding sequence. In some embodiments, the expression construct includes 9 copies of the target coding sequence. In some embodiments, the expression construct includes 10 copies of the target coding sequence. In some embodiments, all 1, 2, 3, 4, 5, 6, 7, 8, 9, or 10 copies of a target coding sequence are operably linked to one or more promoters. For example, multiple copies of the target coding sequence may be operably linked to a single promoter. In some embodiments, all 1, 2, 3, 4, 5, 6, 7, 8, 9, or 10 copies of a target coding sequence are operably linked to one or more 3′ terminator sequences.

[0266] A modified U7 snRNA may be expressed from a U7 cassette. A functional U7 cassette may include, in the following order from 5′ to 3′: (1) a promoter, (2) an optional exonic splicing silencer, (3) a targeting sequence complementary to a region of a target mRNA, (4) an smOPT sequence, (5) a hairpin sequence, and (6) a 3′ termination signal. The expressed functional U7 snRNA consists of, in the following order from 5′ to 3′: (1) an optional exonic splicing silencer, (2) a targeting sequence complementary to a region of target mRNA, (3) an smOPT sequence, and (4) a hairpin sequence.

### Pharmaceutical Compositions

[0267] Disclosed herein, in some embodiments, are compositions. The composition may be a pharmaceutical composition. The composition may include a silencing module. The composition may include an RNA such as recombinant or modified U7 snRNA sequences described herein, or an expression construct. The composition may include an expression construct encoding a recombinant or modified U7 snRNA. The composition may include a synthesis module. The composition may include a target (e.g. MECP2) mRNA comprising a target coding sequence. The composition may include an expression construct comprising or encoding a target coding sequence. The composition may include a viral vector.

[0268] The compositions provided herein are contemplated to be effective for treating diseases. For example, the compositions provided herein are effective gene therapies for diseases such as genetic disorders. The compositions provided herein include systems provided herein, and expression cassettes provided herein. Thus, in an aspect is provided a pharmaceutical composition including a system provided herein including embodiments thereof and a pharmaceutically acceptable carrier.

[0269] The compositions are suitable for formulation and administration in vitro or in vivo. In embodiments, the pharmaceutical composition further includes a pharmaceutically acceptable carrier or excipient. Suitable carriers and excipients and their formulations are known in the art and described, e.g., in Remington: The Science and Practice of Pharmacy, 21st Edition, David B. Troy, ed., Lippicott Williams & Wilkins (2005)., which is incorporated herein in its entirety and for all purposes.

[0270] Described herein, in some embodiments, the components of the system may be combined together within a single nucleic acid. In some embodiments, the components are separated among multiple nucleic acids.

[0271] In some embodiments, a pharmaceutical composition comprising the system and a pharmaceutically acceptable carrier is described. A composition may include a carrier such as a pharmaceutically acceptable carrier. Examples of carriers may include a solution such as water, a buffer, or saline, or a lipid composition.

[0272] The composition may include a delivery agent such as a virus, liposome, or nanoparticle. In some embodiments, the composition includes a delivery agent. In some embodiments, the delivery agent includes a virus. In some embodiments, the delivery agent includes a liposome. In some embodiments, the delivery agent includes a nanoparticle.

[0273] In an aspect is provided a virus including the system provided herein including embodiments thereof. In embodiments, the virus includes an adeno-associated virus (AAV). A virus may include the nucleic acid system. In some embodiments, the virus is a parvovirus. An example of a parvovirus may include a dependoparvovirus. An example of a dependoparvovirus may include an adeno-associated virus (AAV). In some embodiments, the virus may be an adeno-associated virus (AAV). In some embodiments, the AAV is a self-complementary AAV. In some embodiments, the AAV is a single-strand AAV. In some embodiments, the AAV may be serotype AAV1. In some embodiments, the AAV may be serotype AAV2. In some embodiments, the AAV may be serotype AAV4. In some embodiments, the AAV may be serotype AAV5. In some embodiments, the AAV may be serotype AAV6. In some embodiments, the AAV may be serotype AAV7. In some embodiments, the AAV may be serotype AAV8. In some embodiments, the AAV may be serotype AAV9.

[0274] In some embodiments, the, AAV may express one U7 cassette. Gene cassettes may include small mobile elements, consisting of a single gene and a recombination site, which may be integrated into larger elements called integrons. Several gene cassettes can be inserted into the same integrin forming a tandem array where cassettes can be expressed together. In some embodiments, the AAV may express an array of two U7 cassettes. In some embodiments, the AAV may express an array of three U7 cassettes. In some embodiments, the AAV may express an array of four U7 cassettes. In some embodiments, the AAV may express an array of five U7 cassettes. In some embodiments, the AAV may express at least one U7 cassette. In some embodiments, the AAV may express an array of at least two U7 cassettes. In some embodiments, the AAV may express an array of at least three U7 cassettes. In some embodiments, the AAV may express an array of at least four U7 cassettes. In some embodiments, the AAV may express an array of at least five U7 cassettes. In some embodiments, the AAV may express at most one U7 cassette. In some embodiments, the AAV may express an array of at most two U7 cassettes. In some embodiments, the AAV may express an array of at most three U7 cassettes. In some embodiments, the AAV may express an array of at most four U7 cassettes. In some embodiments, the AAV may express an array of at most five U7 cassettes.

[0275] In some embodiments, the AAV may express an array of two target (e.g. MECP2) coding sequences. In some embodiments, the AAV may express an array of three target coding sequences. In some embodiments, the AAV may express an array of four target coding sequences. In some embodiments, the AAV may express an array of five target coding sequences. In some embodiments, the AAV may express at least one target coding sequence. In some embodiments, the AAV may express an array of at least two target coding sequences. In some embodiments, the AAV may express an array of at least three target coding sequences. In some embodiments, the AAV may express an array of at least four target coding sequences. In some embodiments, the AAV may express an array of at least five target coding sequences. In some embodiments, the AAV may express at most one target coding sequence. In some embodiments, the AAV may express an array of at most two target coding sequences. In some embodiments, the AAV may express an array of at most three target coding sequences. In some embodiments, the AAV may express an array of at most four target coding sequences. In some embodiments, the AAV may express an array of at most five target coding sequences.

### Cells

[0276] In an aspect is provided a cell including the system provided herein including embodiments thereof. In embodiments, the cell includes an expression cassette comprising the system.

[0277] In embodiments, the cell includes a brain cell. In embodiments, the cell includes a neural cell. In embodiments, the cell includes a neuron. In embodiments, the cell includes a cerebrum cell.

[0278] In embodiments, the cell is a healthy cell. In embodiments, the cell has a genetic disorder. In embodiments, the cell is a Rett Syndrome cell. In embodiments, the cell has a lower expression level of a target protein compared to the expression level of the target protein in a healthy cell. In embodiments, the cell has a lower expression level of a target protein compared to the expression level of the target protein in a healthy cell. In embodiments, the cell is derived from a subject with a genetic disorder. In embodiments, the subject has Rett Syndrome.

[0279] In some embodiments, a cell comprises the system (e.g. a synthesis module and a silencing module). For example, the system may be delivered to a cell. The system may be delivered to the cell in vivo. The system may be delivered to the cell in vitro. The system may be administered to a subject, and thereby enter a cell of the subject.

[0280] In some embodiments, a tissue or biofluid of a subject comprises the system (e.g. modified U7 snRNA). For example, the system may be delivered to a tissue or biofluid. The system may be delivered to the tissue or biofluid in vivo. The system may be delivered to the tissue or biofluid in vitro. The system may be administered to a subject, and thereby enter a tissue or biofluid of the subject. In some embodiments, the tissue includes neural tissue. In some embodiments, the tissue includes brain tissue. In some embodiments, the tissue includes cerebral tissue. In some embodiments, the tissue includes nerve tissue. In some embodiments, the biofluid includes blood. In some embodiments, the biofluid includes serum. In some embodiments, the biofluid includes serum.

### Methods of Treatment

[0281] Described herein, in some embodiments, are methods. The method may include administering a composition or system described herein. The method may include delivering a composition or system described herein in a cell. The method may include expressing a composition or system described herein in a cell. The cell may be in vivo (e.g. in a living body). The cell may be in vitro. The method may include a method of treatment. The method may affect a target (e.g. MECP2) expression in a subject, or in a cell of a subject.

[0282] As described throughout the specification, the system provided herein is contemplated to be effective for treating genetic disorders in a subject. Thus, in an aspect is provided a method of treating a disease in a subject, including administering the system provided herein including embodiments thereof to the subject. In embodiments, the disease is a genetic disorder. An example of a genetic disorder may include Rett Syndrome. Another aspect is provided a method, including administering the pharmaceutical composition provided herein including embodiments thereof or the virus provided herein including embodiments thereof to a subject.

[0283] Described herein, in some embodiments, is a method for treating a disorder in a subject in need thereof. In some embodiments, the subject has the disorder. In some embodiments, the subject is identified as having the disorder. In some embodiments, the subject is at risk of having the disorder. In some embodiments, the subject is identified as at risk of having the disorder. The treatment may have a prophylactic effect. The method may include any aspect of another method described herein, such as modifying expression of a target (e.g. MECP2) in a cell of a subject.

[0284] The disorder may be or include a genetic disorder. In some embodiments, the subject has or is at risk of having a genetic disorder. The disorder may be or include a neurodevelopmental disorder. In some embodiments, the subject has or is at risk of having a neurodevelopmental disorder. In some embodiments, the neurodevelopmental disorder comprises an intellectual disability or epilepsy. The disorder may include an intellectual disability. The disorder may include epilepsy. The disorder may include Rett syndrome.

[0285] The system provided herein has been demonstrated to be effective for regulating expression levels of a target gene affected by a genetic disorder (e.g. Rett Syndrome). For example, administering a system provided herein to a subject allows expression of a recombinant version of a gene in the subject. Thus, in an aspect is provided a method of treating a genetic disease in a subject, including: administering the system provided herein including embodiments thereof to the subject.

[0286] In embodiments, the genetic disease is associated with haploinsufficiency of the endogenous target RNA. In embodiments, the genetic disease is associated with tissue mosaic expression of the endogenous target RNA. In embodiments, the genetic disease includes Rett syndrome.

[0287] In some embodiments, the subject has a disorder. The disorder may include a neurodevelopmental disorder. In some embodiments, the subject is at risk of having the neurodevelopmental disorder. The neurodevelopmental disorder may include Rett syndrome.

[0288] In some embodiments, the treatment improves a phenotypic severity score. The phenotypic severity score may be for Rett syndrome. The phenotypic severity score may be a product of an assessment of any of the following domains: gait, mobility, hindlimb clasping, breathing abnormalities, tremor, general body condition, or a combination thereof. The phenotypic severity score may be a product of an assessment of the following domains: gait, mobility, hindlimb clasping, breathing abnormalities, tremor, and general body condition. An assessment of each of gait, mobility, hindlimb clasping, breathing abnormalities, tremor, or general body condition may include a score of 0, 1, or 2. An assessment of each of gait, mobility, hindlimb clasping, breathing abnormalities, tremor, and general body condition may include a score of 0, 1, or 2. An example of a phenotypic severity score may include a Bird score. In some embodiments, the treatment improves a subject's gait. In some embodiments, the treatment improves a subject's mobility. In some embodiments, the treatment improves a subject's clasping ability. In some embodiments, the treatment improves a subject's breathing. In some embodiments, the treatment improves (e.g. reduces) a subject's tremor. In some embodiments, the treatment improves a subject's general body condition. An improvement in any of the aforementioned domain may be determined by a score (e.g. a score of 0, 1 or 2. As such, an improvement may be reflected as a change in a score of 1 or 2 for any of they aforementioned domains. In some embodiments, an improvement is determined as an increase or decrease in a measurement. The increase or decrease may be by at least 5%, at least 10%, at least 15%, or more, relative to a baseline measurement obtained before the treatment.

### Methods of Modulating Protein Expression

[0289] In an aspect is provided a method including: suppressing protein expression of an endogenous target RNA in a first cell expressing the endogenous target RNA; and synthesizing or enhancing protein expression of a recombinant version of the target RNA in a second cell that otherwise does not express the endogenous target RNA, or that expresses the endogenous target RNA at a low level. Some embodiments include synthesizing or enhancing protein expression of the recombinant version of the target RNA in the first cell. In embodiments, suppressing is performed upon contacting the first cell with a silencing module provided herein including embodiments thereof.

[0290] A construct encoding a synthesis module and a silencing module may be expressed in two cells, where the silencing module suppresses expression of any endogenous target in either cell that has endogenous target expression, while the synthesis module synthesizes protein expression of target in both cells. Some embodiments include suppressing any endogenously expressed target in a group of target cells, and replacing the endogenous target expression with a new target protein in target cells that already express target, while also causing expression of target in target cells that did not already express target or that only expressed target at low levels. In some embodiments, re-expression of target occurs in all target cells, while knockdown only occurs in target cells that endogenously express target mRNA.

[0291] In embodiments, suppressing protein expression includes suppressing endogenous protein expression by at least 10%. In embodiments, endogenous protein expression is suppressed by at least 10% compared to the expression level of the endogenous protein in the absence of the silencing module. In embodiments, endogenous protein expression is suppressed by at least 15% compared to the expression level of the endogenous protein in the absence of the silencing module. In embodiments, endogenous protein expression is suppressed by at least 20% compared to the expression level of the endogenous protein in the absence of the silencing module. In embodiments, endogenous protein expression is suppressed by at least 25% compared to the expression level of the endogenous protein in the absence of the silencing module. In embodiments, endogenous protein expression is suppressed by at least 30% compared to the expression level of the endogenous protein in the absence of the silencing module. In embodiments, endogenous protein expression is suppressed by at least 35% compared to the expression level of the endogenous protein in the absence of the silencing module. In embodiments, endogenous protein expression is suppressed by at least 40% compared to the expression level of the endogenous protein in the absence of the silencing module. In embodiments, endogenous protein expression is suppressed by at least 45% compared to the expression level of the endogenous protein in the absence of the silencing module. In embodiments, endogenous protein expression is suppressed by at least 50% compared to the expression level of the endogenous protein in the absence of the silencing module. In embodiments, endogenous protein expression is suppressed by at least 55% compared to the expression level of the endogenous protein in the absence of the silencing module. In embodiments, endogenous protein expression is suppressed by at least 60% compared to the expression level of the endogenous protein in the absence of the silencing module. In embodiments, endogenous protein expression is suppressed by at least 65% compared to the expression level of the endogenous protein in the absence of the silencing module. In embodiments, endogenous protein expression is suppressed by at least 70% compared to the expression level of the endogenous protein in the absence of the silencing module. In embodiments, endogenous protein expression is suppressed by at least 75% compared to the expression level of the endogenous protein in the absence of the silencing module. In embodiments, endogenous protein expression is suppressed by at least 80% compared to the expression level of the endogenous protein in the absence of the silencing module. In embodiments, endogenous protein expression is suppressed by at least 85% compared to the expression level of the endogenous protein in the absence of the silencing module. In embodiments, endogenous protein expression is suppressed by at least 90% compared to the expression level of the endogenous protein in the absence of the silencing module. In embodiments, endogenous protein expression is suppressed by at least 95% compared to the expression level of the endogenous protein in the absence of the silencing module. In embodiments, endogenous protein expression is suppressed by at least 96% compared to the expression level of the endogenous protein in the absence of the silencing module. In embodiments, endogenous protein expression is suppressed by at least 97% compared to the expression level of the endogenous protein in the absence of the silencing module. In embodiments, endogenous protein expression is suppressed by at least 98% compared to the expression level of the endogenous protein in the absence of the silencing module. In embodiments, endogenous protein expression is suppressed by at least 99% compared to the expression level of the endogenous protein in the absence of the silencing module.

[0292] In embodiments, the synthesizing or enhancing protein expression is performed upon contacting the second cell with a synthesis module herein. In embodiments, enhancing protein expression includes enhancing protein expression by at least 10%. In embodiments, enhancing protein expression refers to increasing the expression level of the target protein in the cell, wherein the target protein is the recombinant version of the target protein. Thus, for the methods provided herein, in embodiments, protein expression is enhanced by at least 10% compared to the expression level of the protein in the absence of the synthesis module. In embodiments, protein expression is enhanced by at least 15% compared to the expression level of the protein in the absence of the synthesis module. In embodiments, protein expression is enhanced by at least 20% compared to the expression level of the protein in the absence of the synthesis module. In embodiments, protein expression is enhanced by at least 25% compared to the expression level of the protein in the absence of the synthesis module. In embodiments, protein expression is enhanced by at least 30% compared to the expression level of the protein in the absence of the synthesis module. In embodiments, protein expression is enhanced by at least 35% compared to the expression level of the protein in the absence of the synthesis module. In embodiments, protein expression is enhanced by at least 40% compared to the expression level of the protein in the absence of the synthesis module. In embodiments, protein expression is enhanced by at least 45% compared to the expression level of the protein in the absence of the synthesis module. In embodiments, protein expression is enhanced by at least 50% compared to the expression level of the protein in the absence of the synthesis module. In embodiments, protein expression is enhanced by at least 55% compared to the expression level of the protein in the absence of the synthesis module. In embodiments, protein expression is enhanced by at least 60% compared to the expression level of the protein in the absence of the synthesis module. In embodiments, protein expression is enhanced by at least 65% compared to the expression level of the protein in the absence of the synthesis module. In embodiments, protein expression is enhanced by at least 70% compared to the expression level of the protein in the absence of the synthesis module. In embodiments, protein expression is enhanced by at least 75% compared to the expression level of the protein in the absence of the synthesis module. In embodiments, protein expression is enhanced by at least 80% compared to the expression level of the protein in the absence of the synthesis module. In embodiments, protein expression is enhanced by at least 85% compared to the expression level of the protein in the absence of the synthesis module. In embodiments, protein expression is enhanced by at least 90% compared to the expression level of the protein in the absence of the synthesis module. In embodiments, protein expression is enhanced by at least 91% compared to the expression level of the protein in the absence of the synthesis module. In embodiments, protein expression is enhanced by at least 92% compared to the expression level of the protein in the absence of the synthesis module. In embodiments, protein expression is enhanced by at least 93% compared to the expression level of the protein in the absence of the synthesis module. In embodiments, protein expression is enhanced by at least 94% compared to the expression level of the protein in the absence of the synthesis module. In embodiments, protein expression is enhanced by at least 95% compared to the expression level of the protein in the absence of the synthesis module. In embodiments, protein expression is enhanced by at least 96% compared to the expression level of the protein in the absence of the synthesis module. In embodiments, protein expression is enhanced by at least 97% compared to the expression level of the protein in the absence of the synthesis module. In embodiments, protein expression is enhanced by at least 98% compared to the expression level of the protein in the absence of the synthesis module. In embodiments, protein expression is enhanced by at least 99% compared to the expression level of the protein in the absence of the synthesis module.

[0293] In embodiments, the low level of expression of the endogenous target RNA in the second cell includes an undetectable level, includes a level below a desired level, includes a level lower than a wild type cell, or includes an expression lower than that of the first cell. In embodiments, the low level of expression of the endogenous target RNA in the second cell includes an undetectable level. Expression of the endogenous target RNA may be measured using any method known by a person skilled in the art, including mass spectrometry, gel electrophoresis, Western Blot, and antibody-based methods (e.g. ELISA). In embodiments, the low level of expression of the endogenous target RNA in the second cell includes a level below a desired level. For example, a desired level of expression may be the expression level of the endogenous target RNA in a healthy cell. In embodiments, a healthy cell does not have a genetic disorder. In embodiments, a healthy does not have Rett disease. In embodiments, the low level of expression of the endogenous target RNA in the second cell includes a level lower than a wild type cell. In embodiments, the wild type cell is a healthy cell. In embodiments, the wild type cell does not have a genetic disorder.

[0294] In embodiments, the low level of expression of the endogenous target RNA in the second cell includes an expression lower than that of the first cell. In embodiments, the low level of expression of the endogenous target RNA in the second cell includes a level at least 10% lower than that of the first cell. In embodiments, the level of expression of the endogenous target RNA in the second cell is at least 10% lower than the expression level of the endogenous target RNA in the first cell. In embodiments, the level of expression of the endogenous target RNA in the second cell is at least 15% lower than the expression level of the endogenous target RNA in the first cell. In embodiments, the level of expression of the endogenous target RNA in the second cell is at least 20% lower than the expression level of the endogenous target RNA in the first cell. In embodiments, the level of expression of the endogenous target RNA in the second cell is at least 25% lower than the expression level of the endogenous target RNA in the first cell. In embodiments, the level of expression of the endogenous target RNA in the second cell is at least 30% lower than the expression level of the endogenous target RNA in the first cell. In embodiments, the level of expression of the endogenous target RNA in the second cell is at least 35% lower than the expression level of the endogenous target RNA in the first cell. In embodiments, the level of expression of the endogenous target RNA in the second cell is at least 40% lower than the expression level of the endogenous target RNA in the first cell. In embodiments, the level of expression of the endogenous target RNA in the second cell is at least 45% lower than the expression level of the endogenous target RNA in the first cell. In embodiments, the level of expression of the endogenous target RNA in the second cell is at least 50% lower than the expression level of the endogenous target RNA in the first cell. In embodiments, the level of expression of the endogenous target RNA in the second cell is at least 55% lower than the expression level of the endogenous target RNA in the first cell. In embodiments, the level of expression of the endogenous target RNA in the second cell is at least 60% lower than the expression level of the endogenous target RNA in the first cell. In embodiments, the level of expression of the endogenous target RNA in the second cell is at least 65% lower than the expression level of the endogenous target RNA in the first cell. In embodiments, the level of expression of the endogenous target RNA in the second cell is at least 70% lower than the expression level of the endogenous target RNA in the first cell. In embodiments, the level of expression of the endogenous target RNA in the second cell is at least 75% lower than the expression level of the endogenous target RNA in the first cell. In embodiments, the level of expression of the endogenous target RNA in the second cell is at least 80% lower than the expression level of the endogenous target RNA in the first cell. In embodiments, the level of expression of the endogenous target RNA in the second cell is at least 85% lower than the expression level of the endogenous target RNA in the first cell. In embodiments, the level of expression of the endogenous target RNA in the second cell is at least 90% lower than the expression level of the endogenous target RNA in the first cell. In embodiments, the level of expression of the endogenous target RNA in the second cell is at least 91% lower than the expression level of the endogenous target RNA in the first cell. In embodiments, the level of expression of the endogenous target RNA in the second cell is at least 92% lower than the expression level of the endogenous target RNA in the first cell. In embodiments, the level of expression of the endogenous target RNA in the second cell is at least 93% lower than the expression level of the endogenous target RNA in the first cell. In embodiments, the level of expression of the endogenous target RNA in the second cell is at least 94% lower than the expression level of the endogenous target RNA in the first cell. In embodiments, the level of expression of the endogenous target RNA in the second cell is at least 95% lower than the expression level of the endogenous target RNA in the first cell. In embodiments, the level of expression of the endogenous target RNA in the second cell is at least 96% lower than the expression level of the endogenous target RNA in the first cell. In embodiments, the level of expression of the endogenous target RNA in the second cell is at least 97% lower than the expression level of the endogenous target RNA in the first cell. In embodiments, the level of expression of the endogenous target RNA in the second cell is at least 98% lower than the expression level of the endogenous target RNA in the first cell. In embodiments, the level of expression of the endogenous target RNA in the second cell is at least 99% lower than the expression level of the endogenous target RNA in the first cell.

[0295] In embodiments, the silencing module and the synthesis module are encoded together in a nucleic acid construct. For example, the silencing module and the synthesis module may be encoded together in a viral vector or a plasmid.

[0296] In embodiments, the silencing module and the synthesis module are encoded in separate nucleic acid constructs. For example, the silencing module and the synthesis module may be encoded in a first viral vector and a second viral vector. In another example, the silencing module and the synthesis module may be encoded in a first plasmid and a second plasmid.

[0297] In embodiments, the nucleic acid construct or the separate nucleic acid constructs are delivered to the cells using one or more viral vectors.

[0298] It is understood that the examples and embodiments described herein are for illustrative purposes only and that various modifications or changes in light thereof will be suggested to persons skilled in the art and are to be included within the spirit and purview of this application and scope of the appended claims. All publications, patents, and patent applications cited herein are hereby incorporated by reference in their entirety for all purposes.

### Administration

[0299] Disclosed herein, in some embodiments, are methods that include administering a composition. The administration may be to a subject. The administration may be to a human subject. The administered composition may include an engineered snRNA. The administered composition may include an expression vector. The administered composition may include an expression vector encoding an engineered snRNA. The administered composition may include a pharmaceutical composition. The administered composition may include a virus. The administered composition may include a virus comprising an expression vector. The administered composition may include a liposome. The administered composition may include a nanoparticle.

[0300] The administration may be by a route of administration. The administration be systemic. The administration be intravenous. The administration may include an injection.

### Definitions

[0301] While various embodiments and aspects of the present invention are shown and described herein, it will be obvious to those skilled in the art that such embodiments and aspects are provided by way of example only. Numerous variations, changes, and substitutions will now occur to those skilled in the art without departing from the invention. It should be understood that various alternatives to the embodiments of the invention described herein may be employed in practicing the invention.

[0302] The section headings used herein are for organizational purposes only and are not to be construed as limiting the subject matter described. All documents, or portions of documents, cited in the application including, without limitation, patents, patent applications, articles, books, manuals, and treatises are hereby expressly incorporated by reference in their entirety for any purpose.

[0303] The abbreviations used herein have their conventional meaning within the chemical and biological arts. The chemical structures and formulae set forth herein are constructed according to the standard rules of chemical valency known in the chemical arts.

[0304] Unless defined otherwise, technical and scientific terms used herein have the same meaning as commonly understood by a person of ordinary skill in the art. See, e.g., Singleton et al., DICTIONARY OF MICROBIOLOGY AND MOLECULAR BIOLOGY 2nd ed., J. Wiley & Sons (New York, NY 1994); Sambrook et al., MOLECULAR CLONING, A LABORATORY MANUAL, Cold Springs Harbor Press (Cold Springs Harbor, NY 1989). Any methods, devices and materials similar or equivalent to those described herein can be used in the practice of this invention. The following definitions are provided to facilitate understanding of certain terms used frequently herein and are not meant to limit the scope of the present disclosure.

[0305] Throughout this application, various embodiments may be presented in a range format. It should be understood that the description in range format is merely for convenience and brevity and should not be construed as an inflexible limitation on the scope of the disclosure. Accordingly, the description of a range should be considered to have specifically disclosed all the possible subranges as well as individual numerical values within that range. For example, description of a range such as from 1 to 6 should be considered to have specifically disclosed subranges such as from 1 to 3, from 1 to 4, from 1 to 5, from 2 to 4, from 2 to 6, from 3 to 6 etc., as well as individual numbers within that range, for example, 1, 2, 3, 4, 5, and 6. This applies regardless of the breadth of the range.

[0306] As used in the specification and claims, the singular forms “a”, “an” and “the” include plural references unless the context clearly dictates otherwise. For example, the term “a sample” includes a plurality of samples, including mixtures thereof.

[0307] The terms “determining,” “measuring,” “evaluating,” “assessing,” “assaying,” and “analyzing” are often used interchangeably herein to refer to forms of measurement. The terms include determining if an element is present or not (for example, detection). These terms can include quantitative, qualitative or quantitative and qualitative determinations. Assessing can be relative or absolute. “Detecting the presence of” can include determining the amount of something present in addition to determining whether it is present or absent depending on the context.

[0308] As used herein, the term “about” a number refers to that number plus or minus 15% of that number. The term “about” a range refers to that range minus 15% of its lowest value and plus 15% of its greatest value.

[0309] As may be used herein, the terms “nucleic acid,” “nucleic acid molecule,” “nucleic acid oligomer,” “oligonucleotide,” “nucleic acid sequence,” “nucleic acid fragment” and “polynucleotide” may be used interchangeably and are intended to include, but are not limited to, a polymeric form of nucleotides covalently linked together that may have various lengths, either deoxyribonucleotides or ribonucleotides, or analogs, derivatives or modifications thereof. Different polynucleotides may have different three-dimensional structures, and may perform various functions, known or unknown. Non-limiting examples of polynucleotides include a gene, a gene fragment, an exon, an intron, intergenic DNA (including, without limitation, heterochromatic DNA), messenger RNA (mRNA), small nuclear RNA (snRNA), small interfering RNA (siRNA), transfer RNA, ribosomal RNA, a ribozyme, cDNA, a recombinant polynucleotide, a branched polynucleotide, a plasmid, a vector, isolated DNA of a sequence, isolated RNA of a sequence, a nucleic acid probe, and a primer. For example, the nucleic acid provided herein may be part of a vector. In embodiments, the nucleic acid provided herein may be part of a lentiviral vector, which may be transduced into a cell. Polynucleotides useful in the methods of the disclosure may comprise natural nucleic acid sequences and variants thereof, artificial nucleic acid sequences, or a combination of such sequences.

[0310] Nucleic acids may include nonspecific sequences. As used herein, the term “nonspecific sequence” refers to a nucleic acid sequence that contains a series of residues that are not designed to be complementary to or are only partially complementary to any other nucleic acid sequence. By way of example, a nonspecific nucleic acid sequence is a sequence of nucleic acid residues that does not function as an inhibitory nucleic acid when contacted with a cell or organism.

[0311] A polynucleotide is typically composed of a specific sequence of four nucleotide bases: adenine (A); cytosine (C); guanine (G); and thymine (T) (uracil (U) in place of thymine (T) when the polynucleotide is RNA). Thus, the term “polynucleotide sequence” may be the alphabetical representation of a polynucleotide molecule; alternatively, the term may be applied to the polynucleotide molecule itself. This alphabetical representation can be input into databases in a computer having a central processing unit and used for bioinformatics applications such as functional genomics and homology searching. Polynucleotides may optionally include one or more non-standard nucleotide(s), nucleotide analog(s) and/or modified nucleotides.

[0312] The term “complement,” as used herein, may refer to a nucleotide (e.g., RNA or DNA) or a sequence of nucleotides capable of base pairing with a complementary nucleotide or sequence of nucleotides. As described herein and commonly known in the art the complementary (matching) nucleotide of adenosine is thymidine and the complementary (matching) nucleotide of guanosine is cytosine. Thus, a complement may include a sequence of nucleotides that base pair with corresponding complementary nucleotides of a second nucleic acid sequence. The nucleotides of a complement may partially or completely match the nucleotides of the second nucleic acid sequence. Where the nucleotides of the complement completely match each nucleotide of the second nucleic acid sequence, the complement forms base pairs with each nucleotide of the second nucleic acid sequence. Where the nucleotides of the complement partially match the nucleotides of the second nucleic acid sequence only some of the nucleotides of the complement form base pairs with nucleotides of the second nucleic acid sequence. Examples of complementary sequences include coding and a non-coding sequences, wherein the non-coding sequence contains complementary nucleotides to the coding sequence and thus forms the complement of the coding sequence. A further example of complementary sequences are sense and antisense sequences, wherein the sense sequence contains complementary nucleotides to the antisense sequence and thus forms the complement of the antisense sequence. Thus, a nucleic acid sequence of the present invention may include a complement of a sequence provided herein.

[0313] As described herein the complementarity of sequences may be partial, in which only some of the nucleic acids match according to base pairing, or complete, where all the nucleic acids match according to base pairing. Thus, two sequences that are complementary to each other, may have a specified percentage of nucleotides that are the same (i.e., about 60% identity, preferably 65%, 70%, 75%, 75%, 85%, 90%, 91%, 92%, 93%, 94%, 95%, 96%, 97%, 98%, 99%, or higher identity over a specified region).

[0314] Amino acids may be referred to herein by either their commonly known three letter symbols or by the one-letter symbols recommended by the IUPAC-IUB Biochemical Nomenclature Commission. Nucleotides, likewise, may be referred to by their commonly accepted single-letter codes.

[0315] An amino acid or nucleotide base “position” is denoted by a number that sequentially identifies each amino acid (or nucleotide base) in the reference sequence based on its position relative to the N-terminus (or 5′-end). Due to deletions, insertions, truncations, fusions, and the like that must be taken into account when determining an optimal alignment, in general the amino acid residue number in a test sequence determined by simply counting from the N-terminus will not necessarily be the same as the number of its corresponding position in the reference sequence. For example, in a case where a variant has a deletion relative to an aligned reference sequence, there will be no amino acid in the variant that corresponds to a position in the reference sequence at the site of deletion. Where there is an insertion in an aligned reference sequence, that insertion will not correspond to a numbered amino acid position in the reference sequence. In the case of truncations or fusions there can be stretches of amino acids in either the reference or aligned sequence that do not correspond to any amino acid in the corresponding sequence.

[0316] The terms “numbered with reference to” or “corresponding to,” when used in the context of the numbering of a given amino acid or polynucleotide sequence, refers to the numbering of the residues of a specified reference sequence when the given amino acid or polynucleotide sequence is compared to the reference sequence. An amino acid residue in a protein “corresponds” to a given residue when it occupies the same essential structural position within the protein as the given residue. One skilled in the art will immediately recognize the identity and location of residues corresponding to a specific position in a protein in other proteins with different numbering systems. For example, by performing a simple sequence alignment with a protein the identity and location of residues corresponding to specific positions of the protein are identified in other protein sequences aligning to the protein. For example, a selected residue in a selected protein corresponds to glutamic acid at position 138 when the selected residue occupies the same essential spatial or other structural relationship as a glutamic acid at position 138. In some embodiments, where a selected protein is aligned for maximum homology with a protein, the position in the aligned selected protein aligning with glutamic acid 138 is the to correspond to glutamic acid 138. Instead of a primary sequence alignment, a three-dimensional structural alignment can also be used, e.g., where the structure of the selected protein is aligned for maximum correspondence with the glutamic acid at position 138, and the overall structures compared. In this case, an amino acid that occupies the same essential position as glutamic acid 138 in the structural model is the to correspond to the glutamic acid 138 residue.

[0317] “Conservatively modified variants” may apply to both amino acid and nucleic acid sequences. With respect to particular nucleic acid sequences, “conservatively modified variants” may refer to those nucleic acids that encode identical or essentially identical amino acid sequences. Because of the degeneracy of the genetic code, a number of nucleic acid sequences will encode any given protein. For instance, the codons GCA, GCC, GCG and GCU all encode the amino acid alanine. Thus, at every position where an alanine is specified by a codon, the codon can be altered to any of the corresponding codons described without altering the encoded polypeptide. Such nucleic acid variations may be “silent variations,” which may be one species of conservatively modified variations. Every nucleic acid sequence herein which encodes a polypeptide may also describe every possible silent variation of the nucleic acid. One of skill will recognize that each codon in a nucleic acid (except AUG, which is ordinarily the only codon for methionine, and TGG, which is ordinarily the only codon for tryptophan) can be modified to yield a functionally identical molecule. Accordingly, each silent variation of a nucleic acid which encodes a polypeptide is implicit in each described sequence.

[0318] As to amino acid sequences, one of skill will recognize that individual substitutions, deletions or additions to a nucleic acid, peptide, polypeptide, or protein sequence which alters, adds or deletes a single amino acid or a small percentage of amino acids in the encoded sequence is a “conservatively modified variant” where the alteration results in the substitution of an amino acid with a chemically similar amino acid. Conservative substitution tables providing functionally similar amino acids are well known in the art. Such conservatively modified variants are in addition to and do not exclude polymorphic variants, interspecies homologs, and alleles of the disclosure.

[0319] The terms “identical” or percent “identity,” in the context of two or more nucleic acids or polypeptide sequences, may refer to two or more sequences or subsequences that are the same or have a specified percentage of amino acid residues or nucleotides that are the same (i.e., about 60% identity, preferably 65%, 70%, 75%, 75%, 85%, 90%, 91%, 92%, 93%, 94%, 95%, 96%, 97%, 98%, 99%, or higher identity over a specified region, when compared and aligned for maximum correspondence over a comparison window or designated region) as measured using a BLAST or BLAST 2.0 sequence comparison algorithms with default parameters described below, or by manual alignment and visual inspection (see, e.g., NCBI web site www.ncbi.nlm.nih.gov/BLAST/or the like). Such sequences are then said to be “substantially identical.” This definition also refers to, or may be applied to, the compliment of a test sequence. The definition also includes sequences that have deletions and/or additions, as well as those that have substitutions. The preferred algorithms can account for gaps and the like. Preferably, identity exists over a region that is at least about 25 amino acids or nucleotides in length, or more preferably over a region that is 50-100 amino acids or nucleotides in length.

[0320] “Percentage of sequence identity” may be determined by comparing two optimally aligned sequences over a comparison window, wherein the portion of the polynucleotide or polypeptide sequence in the comparison window may comprise additions or deletions (i.e., gaps) as compared to the reference sequence (which does not comprise additions or deletions) for optimal alignment of the two sequences. The percentage is calculated by determining the number of positions at which the identical nucleic acid base or amino acid residue occurs in both sequences to yield the number of matched positions, dividing the number of matched positions by the total number of positions in the window of comparison and multiplying the result by 100 to yield the percentage of sequence identity.

[0321] An amino acid or nucleotide base “position” may be denoted by a number that sequentially identifies each amino acid (or nucleotide base) in the reference sequence based on its position relative to the N-terminus (or 5′-end). Due to deletions, insertions, truncations, fusions, and the like that must be taken into account when determining an optimal alignment, in general the amino acid residue number in a test sequence determined by simply counting from the N-terminus will not necessarily be the same as the number of its corresponding position in the reference sequence. For example, in a case where a variant has a deletion relative to an aligned reference sequence, there will be no amino acid in the variant that corresponds to a position in the reference sequence at the site of deletion. Where there is an insertion in an aligned reference sequence, that insertion will not correspond to a numbered amino acid position in the reference sequence. In the case of truncations or fusions there can be stretches of amino acids in either the reference or aligned sequence that do not correspond to any amino acid in the corresponding sequence.

[0322] A “comparison window”, as used herein, may include reference to a segment of any one of the number of contiguous positions selected from the group consisting of, e.g., a full length sequence or from 20 to 600, about 50 to about 200, or about 100 to about 150 amino acids or nucleotides in which a sequence may be compared to a reference sequence of the same number of contiguous positions after the two sequences are optimally aligned. Methods of alignment of sequences for comparison are well-known in the art. Optimal alignment of sequences for comparison can be conducted, e.g., by the local homology algorithm of Smith and Waterman (1970) Adv. Appl. Math. 2: 482c, by the homology alignment algorithm of Needleman and Wunsch (1970) J. Mol. Biol. 48:443, by the search for similarity method of Pearson and Lipman (1988) Proc. Nat'l. Acad. Sci. USA 85:2444, by computerized implementations of these algorithms (GAP, BESTFIT, FASTA, and TFASTA in the Wisconsin Genetics Software Package, Genetics Computer Group, 575 Science Dr., Madison, WI), or by manual alignment and visual inspection (see, e.g., Ausubel et al., Current Protocols in Molecular Biology (1995 supplement)).

[0323] An example of an algorithm that may be suitable for determining percent sequence identity and sequence similarity are the BLAST and BLAST 2.0 algorithms, which are described in Altschul et al. (1977) Nuc. Acids Res. 25:3389-3402, and Altschul et al. (1990) J. Mol. Biol. 215:403-410, respectively. Software for performing BLAST analyses is publicly available through the National Center for Biotechnology Information (www.ncbi.nlm.nih.gov/). This algorithm involves first identifying high scoring sequence pairs (HSPs) by identifying short words of length W in the query sequence, which either match or satisfy some positive-valued threshold score T when aligned with a word of the same length in a database sequence. T is referred to as the neighborhood word score threshold (Altschul et al., supra). These initial neighborhood word hits may act as seeds for initiating searches to find longer HSPs containing them. The word hits may be extended in both directions along each sequence for as far as the cumulative alignment score can be increased. Cumulative scores are calculated using, for nucleotide sequences, the parameters M (reward score for a pair of matching residues; always >0) and N (penalty score for mismatching residues; always <0). For amino acid sequences, a scoring matrix is used to calculate the cumulative score. Extension of the word hits in each direction are halted when: the cumulative alignment score falls off by the quantity X from its maximum achieved value; the cumulative score goes to zero or below, due to the accumulation of one or more negative-scoring residue alignments; or the end of either sequence is reached. The BLAST algorithm parameters W, T, and X determine the sensitivity and speed of the alignment. The BLASTN program (for nucleotide sequences) uses as defaults a word length (W) of 11, an expectation (E) or 10, M=5, N=−4 and a comparison of both strands. For amino acid sequences, the BLASTP program uses as defaults a word length of 3, and expectation (E) of 10, and the BLOSUM62 scoring matrix (see Henikoff and Henikoff (1989) Proc. Natl. Acad. Sci. USA 89:10915) alignments (B) of 50, expectation (E) of 10, M=5, N=−4, and a comparison of both strands.

[0324] The BLAST algorithm may also perform a statistical analysis of the similarity between two sequences (see, e.g., Karlin and Altschul (1993) Proc. Natl. Acad. Sci. USA 90:5873-5787). One measure of similarity provided by the BLAST algorithm is the smallest sum probability (P(N)), which provides an indication of the probability by which a match between two nucleotide or amino acid sequences would occur by chance. For example, a nucleic acid is considered similar to a reference sequence if the smallest sum probability in a comparison of the test nucleic acid to the reference nucleic acid is less than about 0.2, more preferably less than about 0.01, and most preferably less than about 0.001.

[0325] For specific proteins described herein, the named protein may include any of the protein's naturally occurring forms, variants or homologs that maintain activity of the protein (e.g., within at least 50%, 75%, 90%, 95%, 96%, 97%, 98%, 99% or 100% activity compared to the native protein). In some embodiments, variants or homologs have at least 90%, 95%, 96%, 97%, 98%, 99% or 100% amino acid sequence identity across the whole sequence or a portion of the sequence (e.g. a 50, 100, 150 or 200 continuous amino acid portion) compared to a naturally occurring form. In other embodiments, the protein is the protein as identified by its NCBI sequence reference. In other embodiments, the protein is the protein as identified by its NCBI sequence reference, homolog or functional fragment thereof.

[0326] The term “meCP2 protein”, “meCP2” or “MECP2” as used herein may include any of the recombinant or naturally-occurring forms of methyl CpG binding protein 2 (meCP2), also known as demethylase, DMTase, or variants or homologs thereof that maintain meCP2 activity (e.g. within at least 50%, 80%, 90%, 95%, 96%, 97%, 98%, 99% or 100% activity compared to meCP2). In embodiments, MECP2 refers to a recombinant form of MECP2 protein. In embodiments, MECP2 refers to a naturally occurring form of MECP2 protein. For example, in embodiments, MECP2 refers to a MECP2 protein endogenous to a cell. In some aspects, the variants or homologs have at least 90%, 95%, 96%, 97%, 98%, 99% or 100% amino acid sequence identity across the whole sequence or a portion of the sequence (e.g. a 50, 100, 150 or 200 continuous amino acid portion) compared to a naturally occurring meCP2 protein. In embodiments, the meCP2 protein is substantially identical to the protein identified by the UniProt reference number P51608 (last updated Oct. 1, 1996) or a variant or homolog having substantial identity thereto. The MECP2 protein may include the amino acid sequence of SEQ ID NO: 923. The MECP2 protein may include an amino acid sequence at least 85%, at least 90%, at least 91%, at least 92%, at least 93%, at least 94%, at least 95%, at least 96%, at least 97%, at least 98%, or at least 99% identical to SEQ ID NO: 923.

[0327] There multiple possible isoforms of MECP2. One example utilizes exons 1, 3, and 4 (where 2 is spliced out) and one example utilizes 1, 2, 3, and 4. In the second isoform an alternative translation start site at the 3′ end of exon 2 is used instead of the one located in exon 1, so there is an extended 5′ UTR. This isoform is almost exclusively expressed outside of the CNS during embryonic development. Its utilization is then shut off in most/all tissues after birth. Examples of exon 1 are provided as SEQ ID NO: 924 (mouse) and 927 (human). Examples of exon 3 are provided as SEQ ID NO: 925 (mouse) and 928 (human). Examples of exon 4 are provided as SEQ ID NO: 926 (mouse) and 929 (human).

[0328] A “gene” may include a segment of a nucleic acid involved in producing a protein; a gene may include regions preceding and following the coding region (leader and trailer) as well as intervening sequences (introns) between individual coding segments (exons). The leader, the trailer as well as the introns may include regulatory elements that are necessary during the transcription and the translation of a gene. In embodiments, a gene may include a nucleic acid such as a DNA sequence involved in producing a protein.

[0329] The terms “plasmid”, “vector” or “expression vector” may refer to a nucleic acid molecule that encodes for genes and/or regulatory elements necessary for the expression of genes. Expression of a gene from a plasmid can occur in cis or in trans. If a gene is expressed in cis, the gene and the regulatory elements may be encoded by the same plasmid. Expression in trans may refer to instances where the gene and the regulatory elements are encoded by separate plasmids.

[0330] As used herein, the term “construct” may be intended to mean any recombinant nucleic acid molecule. In embodiments, a construct includes an expression cassette, plasmid, cosmid, virus, autonomously replicating polynucleotide molecule, phage, or linear or circular, single-stranded or double-stranded, DNA or RNA polynucleotide molecule. A construct may be derived from any source, capable of genomic integration or autonomous replication, including a nucleic acid molecule where one or more nucleic acid sequences has been linked in a functionally operative manner, e.g., operably linked.

[0331] The terms “operably linked” or “functionally linked”, may be interchangeable and may refer to a physical or functional linkage between two or more elements, e.g., polypeptide sequences or polynucleotide sequences, which permits them to operate in their intended fashion. For example, an operable linkage between a polynucleotide of interest and a regulatory sequence (for example, a promoter) may be a functional link that allows for expression of the polynucleotide of interest. In this sense, the term “operably linked” refers to the positioning of a regulatory region (e.g. a promoter) and a coding sequence (e.g. polynucleotide encoding a gene editing agent, etc.) to be transcribed so that the regulatory region is effective for regulating transcription or translation of the coding sequence of interest. In some embodiments disclosed herein, the term “operably linked” denotes a configuration in which a regulatory sequence is placed at an appropriate position relative to a sequence that encodes a polypeptide or functional RNA such that the control sequence directs or regulates the expression or cellular localization of the mRNA encoding the polypeptide, the polypeptide, and/or the functional RNA. Thus, operably linked elements may be contiguous or non-contiguous. In addition, in the context of a polypeptide, “operably linked” refers to a physical linkage (e.g., directly or indirectly linked) between amino acid sequences (e.g., different segments, modules, or domains) to provide for a described activity of the polypeptide. In the present disclosure, various segments, regions, or domains of the engineered antibodies disclosed herein may be operably linked to retain proper folding, processing, targeting, expression, binding, and other functional properties of the engineered antibodies in the cell. Operably linked regions, domains, and segments of the engineered antibodies of the disclosure may be contiguous or non-contiguous (e.g., linked to one another through a linker).

[0332] The terms “transfection”, “transduction”, “transfecting” or “transducing” can be used interchangeably and are defined as a process of introducing a nucleic acid molecule or a protein to a cell. Nucleic acids are introduced to a cell using non-viral or viral-based methods. The nucleic acid molecules may be gene sequences encoding complete proteins or functional portions thereof. Non-viral methods of transfection include any appropriate transfection method that does not use viral DNA or viral particles as a delivery system to introduce the nucleic acid molecule into the cell. Exemplary non-viral transfection methods include calcium phosphate transfection, liposomal transfection, nucleofection, sonoporation, transfection through heat shock, magnetifection and electroporation. In some embodiments, the nucleic acid molecules are introduced into a cell using electroporation following standard procedures well known in the art. For viral-based methods of transfection any useful viral vector may be used in the methods described herein. Examples for viral vectors include, but are not limited to retroviral, adenoviral, lentiviral and adeno-associated viral vectors. In some embodiments, the nucleic acid molecules are introduced into a cell using a lentiviral vector following standard procedures well known in the art. The terms “transfection” or “transduction” also refer to introducing proteins into a cell from the external environment. Typically, transduction or transfection of a protein relies on attachment of a peptide or protein capable of crossing the cell membrane to the protein of interest. See, e.g., Ford et al. (2001) Gene Therapy 8:1-4 and Prochiantz (2007) Nat. Methods 4:119-20.

[0333] “Transduce” or “transduction” may be used according to their plain ordinary meanings and refer to the process by which one or more foreign nucleic acids (i.e. DNA not naturally found in the cell) are introduced into a cell. Typically, transduction occurs by introduction of a virus or viral vector (e.g. a CMV vector, a lentivirus vector, etc.) into the cell.

[0334] As used herein, the term “promoter” may refer to a sequence of DNA which proteins bind to initiate gene expression. For example, transcription factors may bind a promoter region of a gene to transcribe RNA from DNA.

[0335] “Contacting” may be used in accordance with its plain ordinary meaning and refers to the process of allowing at least two distinct species (e.g. chemical compounds including biomolecules or cells) to become sufficiently proximal to react, interact or physically touch. It should be appreciated; however, the resulting reaction product can be produced directly from a reaction between the added reagents or from an intermediate from one or more of the added reagents that can be produced in the reaction mixture.

[0336] The term “contacting” may include allowing two species to react, interact, or physically touch, wherein the two species may be, for example, a nucleic acid as provided herein and a cell. In embodiments contacting includes, for example, allowing a nucleic acid as described herein to interact with a cell. In embodiments, contacting refers to allowing a system provided herein to interact with a cell. Thus, in embodiments, contacting includes allowing a nucleic acid to interact with a cell, thereby resulting in transduced cell. In embodiments contacting includes, for example, allowing a pharmaceutical composition as described herein to interact with a cell. In embodiments contacting includes, for example, allowing an expression cassette (e.g. expression vector, construct) as described herein to interact with a cell.

[0337] A “cell” as used herein, refers to a cell carrying out metabolic function or other function sufficient to preserve or replicate its genomic DNA. A cell can be identified by well-known methods in the art including, for example, presence of an intact membrane, staining by a particular dye, ability to produce progeny or, in the case of a gamete, ability to combine with a second gamete to produce a viable offspring. Cells may include prokaryotic and eukaroytic cells. Prokaryotic cells include but are not limited to bacteria. Eukaryotic cells include but are not limited to yeast cells and cells derived from plants and animals, for example mammalian, insect (e.g., spodoptera) and human cells. Cells may be useful when they are naturally nonadherent or have been treated not to adhere to surfaces, for example by trypsinization.

[0338] The terms “virus” or “virus particle” may be used according to its plain ordinary meaning within Virology and refers to a virion including the viral genome (e.g. DNA, RNA, single strand, double strand), viral capsid and associated proteins, and in the case of enveloped viruses (e.g. herpesvirus), an envelope including lipids and optionally components of host cell membranes, and/or viral proteins.

[0339] The term “replicate” may be used in accordance with its plain ordinary meaning and refers to the ability of a cell or virus to produce progeny. A person of ordinary skill in the art will immediately understand that the term replicate when used in connection with DNA, refers to the biological process of producing two identical replicas of DNA from one original DNA molecule.

[0340] In the context of a virus, the term “replicate” may include an ability of a virus to replicate (duplicate the viral genome and packaging said genome into viral particles) in a host cell and subsequently release progeny viruses from the host cell, which results in the lysis of the host cell.

[0341] The term “recombinant” when used with reference, e.g., to a cell, nucleic acid, protein, or vector, indicates that the cell, nucleic acid, protein or vector, has been modified by the introduction of a heterologous nucleic acid or protein or the alteration of a native nucleic acid or protein, or that the cell is derived from a cell so modified. Thus, for example, recombinant cells express proteins that are not found within the native (non-recombinant) form of the cell. A recombinant RNA may include an RNA that is encoded unnaturally in a cell, such as being encoded by a vector that is introduced to the cell.

[0342] The term “heterologous” when used with reference to portions of a nucleic acid indicates that the nucleic acid comprises two or more subsequences that are not found in the same relationship to each other in nature. For instance, the nucleic acid is typically recombinantly produced, having two or more sequences from unrelated genes arranged to make a new functional nucleic acid, e.g., a promoter from one source and a coding region from another source. Similarly, a heterologous protein indicates that the protein comprises two or more subsequences that are not found in the same relationship to each other in nature (e.g., a fusion protein).

[0343] The term “exogenous” may refer to a molecule or substance (e.g., a compound, nucleic acid or protein) that originates from outside a given cell or organism. For example, an “exogenous promoter” as referred to herein is a promoter that does not originate from the cell or organism it is expressed by. Conversely, the term “endogenous” or “endogenous promoter” may refer to a molecule or substance that is native to, or originates within, a given cell or organism.

[0344] The term “expression” may include any step involved in the production of the polypeptide including, but not limited to, transcription, post-transcriptional modification, translation, post-translational modification, and secretion. Expression can be detected using conventional techniques for detecting protein (e.g., ELISA, Western blotting, flow cytometry, immunofluorescence, immunohistochemistry, etc.).

[0345] “Control” or “control experiment” is used in accordance with its plain ordinary meaning and refers to an experiment in which the subjects or reagents of the experiment are treated as in a parallel experiment except for omission of a procedure, reagent, or variable of the experiment. In some instances, the control is used as a standard of comparison in evaluating experimental effects. In some embodiments, a control is the measurement of the activity of a protein in the absence of a compound as described herein (including embodiments and examples).

[0346] A “control” or “standard control” may refer to a sample, measurement, or value that serves as a reference, usually a known reference, for comparison to a test sample, measurement, or value. For example, a test sample can be taken from a patient suspected of having a given disease (e.g. cancer) and compared to a known normal (non-diseased) individual (e.g. a standard control subject). A standard control can also represent an average measurement or value gathered from a population of similar individuals (e.g. standard control subjects) that do not have a given disease (i.e. standard control population), e.g., healthy individuals with a similar medical background, same age, weight, etc. A standard control value can also be obtained from the same individual, e.g. from an earlier-obtained sample from the patient prior to disease onset. For example, a control can be devised to compare therapeutic benefit based on pharmacological data (e.g., half-life) or therapeutic measures (e.g., comparison of side effects). Controls are also valuable for determining the significance of data. For example, if values for a given parameter are widely variant in controls, variation in test samples will not be considered as significant. One of skill will recognize that standard controls can be designed for assessment of any number of parameters (e.g. RNA levels, protein levels, specific cell types, specific bodily fluids, specific tissues, etc).

[0347] One of skill in the art will understand which standard controls are most appropriate in a given situation and be able to analyze data based on comparisons to standard control values. Standard controls are also valuable for determining the significance (e.g. statistical significance) of data. For example, if values for a given parameter are widely variant in standard controls, variation in test samples will not be considered as significant.

[0348] “Patient”, “subject” or “subject in need thereof” may refer to a living organism suffering from or prone to a disease or condition that can be treated by administration of a pharmaceutical composition as provided herein. Non-limiting examples include humans, other mammals, bovines, rats, mice, dogs, monkeys, goat, sheep, cows, deer, and other non-mammalian animals. In some embodiments, a patient is human. The patient may be male. The patient may be female. For example, in an X-linked haploinsufficiency disease or disorder, the patient may likely be a female.

[0349] The terms “disease” or “condition” may refer to a state of being or health status of a patient or subject capable of being treated with the compounds or methods provided herein. The disease may be a genetic disorder. In embodiments, the genetic disorder is Rett Syndrome.

[0350] The term “aberrant” as used herein may refer to different from normal. When used to describe enzymatic activity or protein function, aberrant refers to activity or function that is greater or less than a normal control or the average of normal non-diseased control samples. Aberrant activity may refer to an amount of activity that results in a disease, wherein returning the aberrant activity to a normal or non-disease-associated amount (e.g. by administering a compound or using a method as described herein), results in reduction of the disease or one or more disease symptoms.

[0351] Some embodiments relate to a small nuclear RNA (snRNA). An snRNA may include a class of small RNA molecules found within splicing speckles or Cajal bodies of a eukaryotic cell nucleus. A length of an unmodified snRNA may average about 150 nucleotides. An snRNA may be transcribed by RNA polymerase II or RNA polymerase III. An snRNA may function in the processing of pre-messenger RNA (hnRNA) in the nucleus. Any of these aspects may be modified or missing in a modified or engineered snRNA. An snRNA may associate with a protein or set of proteins to form a complex. The complex may be referred to as a small nuclear ribonucleoprotein (snRNP). Some examples of human snRNA components of such complexes may include: U1 spliceosomal RNA, U2 spliceosomal RNA, U4 spliceosomal RNA, U5 spliceosomal RNA, or U6 spliceosomal RNA. An snRNA may have a high uridine content.

[0352] Some embodiments relate to a U7 snRNA. A U7 snRNA may include an RNA molecule and a component of a small nuclear ribonucleoprotein complex (U7 snRNP). The U7 snRNA may affect histone pre-mRNA processing. The U7 snRNA may be modified or engineered. In some embodiments, the modified or engineered U7 snRNA does not affect histone pre-mRNA processing, or has little effect on such. In some embodiments, a U7 snRNA has a 5′ end that binds an HDE (histone downstream element), a conserved purine-rich region, located 15 nucleotides downstream a histone mRNA cleavage site. Any of these aspects may be modified or missing in a modified or engineered U7 snRNA. Binding of an HDE region by a U7 snRNA, through complementary base-pairing, may affect recruitment of cleavage factors during histone pre-mRNA processing.

[0353] The terms “treating”, or “treatment” may refer to an indicia of success in the therapy or amelioration of an injury, disease, pathology or condition, including any objective or subjective parameter such as abatement; remission; diminishing of symptoms or making the injury, pathology or condition more tolerable to the patient; slowing in the rate of degeneration or decline; making the final point of degeneration less debilitating; improving a patient's physical or mental well-being. The treatment or amelioration of symptoms can be based on objective or subjective parameters; including the results of a physical examination, neuropsychiatric exams, and/or a psychiatric evaluation. The term “treating” and conjugations thereof, may include prevention of an injury, pathology, condition, or disease. In embodiments, treating includes preventing. In embodiments, treating does not include preventing.

[0354] “Treating” or “treatment” as used herein (and as well-understood in the art) may broadly include any approach for obtaining beneficial or desired results in a subject's condition, including clinical results. Beneficial or desired clinical results can include, but are not limited to, alleviation or amelioration of one or more symptoms or conditions, diminishment of the extent of a disease, stabilizing (i.e., not worsening) the state of disease, prevention of a disease's transmission or spread, delay or slowing of disease progression, amelioration or palliation of the disease state, diminishment of the reoccurrence of disease, and remission, whether partial or total and whether detectable or undetectable. “Treatment” may include a cure, amelioration, or prevention of a disease. Treatment may prevent the disease from occurring; inhibit the disease's spread; relieve the disease's symptoms, fully or partially remove the disease's underlying cause, shorten a disease's duration, or do a combination of these things. Thus in the disclosed method, treatment can refer to a 10%, 20%, 30%, 40%, 50%, 60%, 70%, 75%, 90%, or 100% reduction in the severity of an established disease, condition, or symptom of the disease or condition. For example, a method for treating a disease may be considered to be a treatment when there is a 10% reduction in one or more symptoms of the disease in a subject as compared to a control. Thus the reduction can be a 10%, 20%, 30%, 40%, 50%, 60%, 70%, 75%, 90%, 100%, or any percent reduction in between 10% and 100% as compared to native or control levels. It is understood that treatment does not necessarily refer to a cure or complete ablation of the disease, condition, or symptoms of the disease or condition. Further, as used herein, references to decreasing, reducing, or inhibiting include a change of 10%, 20%, 30%, 40%, 50%, 60%, 70%, 75%, 90% or greater as compared to a control level and such terms can include but do not necessarily include complete elimination.

[0355] A sequence identity may include a sequence identity to a reverse complement. In determining a sequence identity, thymine (T) and uracil (U) may be interchangeable. T and U may be interchangeable when describing an oligonucleotide. In some embodiments, Ts and Us are interchangeable depending on whether the oligonucleotide is an RNA or DNA, where RNA includes U and DNA includes T.

[0356] A discrepancy between the written description and a sequence listing submitted herein may be resolved in favor of the written description.

[0357] “Treating” and “treatment” as used herein may include prophylactic treatment. Treatment methods may include administering to a subject a therapeutically effective amount of an active agent. The administering step may consist of a single administration or may include a series of administrations. The length of the treatment period may depend on a variety of factors, such as the severity of the condition, the age of the patient, the concentration of active agent, the activity of the compositions used in the treatment, or a combination thereof. It will also be appreciated that the effective dosage of an agent used for the treatment or prophylaxis may increase or decrease over the course of a particular treatment or prophylaxis regime. Changes in dosage may result and become apparent by standard diagnostic assays known in the art. In some instances, chronic administration may be required. For example, a composition may be administered to a subject in an amount and for a duration sufficient to treat the subject. In embodiments, the treating or treatment is not prophylactic treatment.

[0358] The term “prevent” may refer to a decrease in the occurrence of disease symptoms in a patient. The prevention may be complete (no detectable symptoms) or partial, such that fewer symptoms are observed than would likely occur absent treatment.

[0359] As used herein, the term “administering” may be used in accordance with its plain and ordinary meaning. An administration may be systemic. An administration may include an injection.

[0360] “Pharmaceutically acceptable excipient” and “pharmaceutically acceptable carrier” may refer to a substance that aids the administration of an active agent to and absorption by a subject and can be included in the compositions of the present disclosure without causing a significant adverse toxicological effect on the patient. Non-limiting examples of pharmaceutically acceptable excipients may include water, NaCl, normal saline solutions, lactated Ringer's, normal sucrose, normal glucose, binders, fillers, disintegrants, lubricants, coatings, sweeteners, flavors, salt solutions (such as Ringer's solution), alcohols, oils, gelatins, carbohydrates such as lactose, amylose or starch, fatty acid esters, hydroxymethycellulose, polyvinyl pyrrolidine, and colors, and the like. Such preparations can be sterilized and, if desired, mixed with auxiliary agents such as lubricants, preservatives, stabilizers, wetting agents, emulsifiers, salts for influencing osmotic pressure, buffers, coloring, and/or aromatic substances and the like that do not deleteriously react with the compounds of the disclosure. One of skill in the art will recognize that other pharmaceutical excipients may be useful in the present disclosure.

[0361] A “therapeutic agent” as used herein may refers to an agent (e.g., compound or composition described herein) that when administered to a subject will have the intended prophylactic effect, e.g., preventing or delaying the onset (or reoccurrence) of an injury, disease, pathology or condition, or reducing the likelihood of the onset (or reoccurrence) of an injury, disease, pathology, or condition, or their symptoms or the intended therapeutic effect, e.g., treatment or amelioration of an injury, disease, pathology or condition, or their symptoms including any objective or subjective parameter of treatment such as abatement; remission; diminishing of symptoms or making the injury, pathology or condition more tolerable to the patient; slowing in the rate of degeneration or decline; making the final point of degeneration less debilitating; or improving a patient's physical or mental well-being.

[0362] It is understood that the examples and embodiments described herein are for illustrative purposes only and that various modifications or changes in light thereof will be suggested to persons skilled in the art and are to be included within the spirit and purview of this application and scope of the appended claims. All publications, patents, and patent applications cited herein are hereby incorporated by reference in their entirety for all purposes.

TABLE 1
TABLES
Sequences of functional elements used in
the different gene therapy vector embodiments
described herein.

| | | SEQ |
|---|---|---|
| | | ID |
| Component | Sequence (5′ to 3′) | NO |
| UbC Promoter | ggcctccgcgccgggttttggcgcctcccgcgggcgcccc | 1 |
| | cctcctcacggcgagcgctgccacgtcagacgaagggcgc | |
| | agcgagcgtcctgatccttccgcccggacgctcaggacag | |
| | cggcccgctgctcataagactcggccttagaaccccagta | |
| | tcagcagaaggacattttaggacgggacttgggtgactct | |
| | agggcactggttttctttccagagagcggaacaggcgagg | |
| | aaaagtagtcccttctcggcgattctgcggagggatctcc | |
| | gtggggcggtgaacgccgatgattatataaggacgcgccg | |
| | ggtgtggcacagctagttccgtcgcagccgggatttgggt | |
| | cgcggttcttgtttgtggatcgctgtgatcgtcacttggt | |
| PGK Promoter | GGGTAGGGGAGGCGCTTTTCCCAAGGCAGTCTGGAGCATG | 2 |
| | CGCTTTAGCAGCCCCGCTGGGCACTTGGCGCTACACAAGT | |
| | GGCCTCTGGCCTCGCACACATTCCACATCCACCGGTAGGC | |
| | GCCAACCGGCTCCGTTCTTTGGTGGCCCCTTCGCGCCACC | |
| | TTCTACTCCTCCCCTAGTCAGGAAGTTCCCCCCCGCCCCG | |
| | CAGCTCGCGTCGTGCAGGACGTGACAAATGGAAGTAGCAC | |
| | GTCTCACTAGTCTCGTGCAGATGGACAGCACCGCTGAGCA | |
| | ATGGAAGCGGGTAGGCCTTTGGGGCAGCGGCCAATAGCAG | |
| | CTTTGCTCCTTCGCTTTCTGGGCTCAGAGGCTGGGAAGGG | |
| | GTGGGTCCGGGGGCGGGCTCAGGGGGGGGCTCAGGGGCGG | |
| | GGCGGGCGCCCGAAGGTCCTCCGGAGGCCCGGCATTCTGC | |
| | ACGCTTCAAAAGCGCACGTCTGCCGCGCTGTTCTCCTCTT | |
| | CCTCATCTCCGGGCCTTTCG | |
| EF1a-core | gctccggtgcccgtcagtgggcagagcgcacatcgcccac | 3 |
| Promoter | agtccccgagaagttggggggaggggtcggcaattgaacc | |
| UbC-SV40 | ggtgcctagagaaggtggcgcggggtaaactgggaaagtg | |
| intron | atgtcgtgtactggctccgcctttttcccgagggtgggga | |
| | gaaccgtatataagtgcagtagtcgccgtgaacgttcttt | |
| | ttcgcaacgggtttgccgccagaacacagggcctccgcgc | |
| | cgggttttggcgcctcccgcgggcgcccccctcctcacgg | |
| | cgagcgctgccacgtcagacgaagggcgcagcgagcgtcc | |
| | tgatccttccgcccggacgctcaggacagcggcccgctgc | |
| | tcataagactcggccttagaaccccagtatcagcagaagg | |
| | acattttaggacgggacttgggtgactctagggcactggt | |
| | tttctttccagagagcggaacaggcgaggaaaagtagtcc | 4 |
| | cttctcggcgattctgcggagggatctccgtggggcggtg | |
| | aacgccgatgattatataaggacgcgccgggtgtggcaca | |
| | gctagttccgtcgcagccgggatttgggtcgcggttcttg | |
| | tttgtggatcgctgtgatcgtcacttggtCGGTAAGTTTA | |
| | GTCTTTTTGTCTTTTATTTCAGGTCCCGGATCCGGTGGTG | |
| | GTGCAAATCAAAGAACTGCTCCTCAGTGGATGTTGCCTTT | |
| | ACTTCTAG | |
| Hs MECP2 5′ | GCGCGCGCTCCCTCCTCTCGGAGAGAGGGCTGTGGTAAAA | 5 |
| UTR | GCCGTCCGGAAAATG | |
| Mm Mecp2 CDS | ATGGCCGCCGCTGCCGCCACCGCCGCCGCCGCCGCCGCGC | 6 |
| | CGAGCGGAGGAGGAGGAGGAGGCGAGGAGGAGAGACTGGA | |
| | GGAAAAGTCAGAAGACCAGGATCTCCAGGGCCTCAGAGAC | |
| | AAGCCACTGAAGTTTAAGAAGGCGAAGAAAGACAAGAAGG | |
| | AGGACAAAGAAGGCAAGCATGAGCCACTACAACCTTCAGC | |
| | CCACCATTCTGCAGAGCCAGCAGAGGCAGGCAAAGCAGAA | |
| | ACATCAGAAAGCTCAGGCTCTGCCCCAGCAGTGCCAGAAG | |
| | CCTCGGCTTCCCCCAAACAGCGGCGCTCCATTATCCGTGA | |
| | CCGGGGACCTATGTATGATGACCCCACCTTGCCTGAAGGT | |
| | TGGACACGAAAGCTTAAACAAAGGAAGTCTGGCCGATCTG | |
| | CTGGAAAGTATGATGTATATTTGATCAATCCCCAGGGAAA | |
| | AGCTTTTCGCTCTAAAGTAGAATTGATTGCATACTTTGAA | |
| | AAGGTGGGAGACACCTCCTTGGACCCTAATGATTTTGACT | |
| | TCACGGTAACTGGGAGAGGGAGCCCCTCCAGGAGAGAGCA | |
| | GAAACCACCTAAGAAGCCCAAATCTCCCAAAGCTCCAGGA | |
| | ACTGGCAGGGGTCGGGGACGCCCCAAAGGGAGCGGCACTG | |
| | GGAGACCAAAGGCAGCAGCATCAGAAGGTGTTCAGGTGAA | |
| | AAGGGTCCTGGAGAAGAGCCCTGGGAAACTTGTTGTCAAG | |
| | ATGCCTTTCCAAGCATCGCCTGGGGGTAAGGGTGAGGGAG | |
| | GTGGGGCTACCACATCTGCCCAGGTCATGGTGATCAAACG | |
| | CCCTGGCAGAAAGCGAAAAGCTGAAGCTGACCCCCAGGCC | |
| | ATTCCTAAGAAACGGGGTAGAAAGCCTGGGAGTGTGGTGG | |
| | CAGCTGCTGCAGCTGAGGCCAAAAAGAAAGCCGTGAAGGA | |
| | GTCTTCCATACGGTCTGTGCATGAGACTGTGCTCCCCATC | |
| | AAGAAGCGCAAGACCCGGGAGACGGTCAGCATCGAGGTCA | |
| | AGGAAGTGGTGAAGCCCCTGCTGGTGTCCACCCTTGGTGA | |
| | GAAAAGCGGGAAGGGACTGAAGACCTGCAAGAGCCCTGGG | |
| | CGTAAAAGCAAGGAGAGCAGCCCCAAGGGGCGCAGCAGCA | |
| | GTGCCTCCTCCCCACCTAAGAAGGAGCACCATCATCACCA | |
| | CCATCACTCAGAGTCCACAAAGGCCCCCATGCCACTGCTC | |
| | CCATCCCCACCCCCACCTGAGCCTGAGAGCTCTGAGGACC | |
| | CCATCAGCCCCCCTGAGCCTCAGGACTTGAGCAGCAGCAT | |
| | CTGCAAAGAAGAGAAGATGCCCCGAGGAGGCTCACTGGAA | |
| | AGCGATGGCTGCCCCAAGGAGCCAGCTAAGACTCAGCCTA | |
| | TGGTCGCCACCACTACCACAGTTGCAGAAAAGTACAAACA | |
| | CCGAGGGGAGGGAGAGCGCAAAGACATTGTTTCATCTTCC | |
| | ATGCCAAGGCCAAACAGAGAGGAGCCTGTGGACAGCCGGA | |
| | CGCCCGTGACCGAGAGAGTTAGCTGA | |
| Hs MECP2 CDS | ATGGCCGCCGCCGCCGCCGCCGCGCCGAGCGGAGGAGGAG | 7 |
| | GAGGAGGCGAGGAGGAGAGACTGGAAGAAAAGTCAGAAGA | |
| | CCAGGACCTCCAGGGCCTCAAGGACAAACCCCTCAAGTTT | |
| | AAAAAGGTGAAGAAAGATAAGAAAGAAGAGAAAGAGGGCA | |
| | AGCATGAGCCCGTGCAGCCATCAGCCCACCACTCTGCTGA | |
| | GCCCGCAGAGGCAGGCAAAGCAGAGACATCAGAAGGGTCA | |
| | GGCTCCGCCCCGGCTGTGCCGGAAGCTTCTGCCTCCCCCA | |
| | AACAGCGGCGCTCCATCATCCGTGACCGGGGACCCATGTA | |
| | TGATGACCCCACCCTGCCTGAAGGCTGGACACGGAAGCTT | |
| | AAGCAAAGGAAATCTGGCCGCTCTGCTGGGAAGTATGATG | |
| | TGTATTTGATCAATCCCCAGGGAAAAGCCTTTCGCTCTAA | |
| | AGTGGAGTTGATTGCGTACTTCGAAAAGGTAGGCGACACA | |
| | TCCCTGGACCCTAATGATTTTGACTTCACGGTAACTGGGA | |
| | GAGGGAGCCCCTCCCGGCGAGAGCAGAAACCACCTAAGAA | |
| | GCCCAAATCTCCCAAAGCTCCAGGAACTGGCAGAGGCCGG | |
| | GGACGCCCCAAAGGGAGCGGCACCACGAGACCCAAGGCGG | |
| | CCACGTCAGAGGGTGTGCAGGTGAAAAGGGTCCTGGAGAA | |
| | AAGTCCTGGGAAGCTCCTTGTCAAGATGCCTTTTCAAACT | |
| | TCGCCAGGGGGCAAGGCTGAGGGGGGTGGGGCCACCACAT | |
| | CCACCCAGGTCATGGTGATCAAACGCCCCGGCAGGAAGCG | |
| | AAAAGCTGAGGCCGACCCTCAGGCCATTCCCAAGAAACGG | |
| | GGCCGAAAGCCGGGGAGTGTGGTGGCAGCCGCTGCCGCCG | |
| | AGGCCAAAAAGAAAGCCGTGAAGGAGTCTTCTATCCGATC | |
| | TGTGCAGGAGACCGTACTCCCCATCAAGAAGCGCAAGACC | |
| | CGGGAGACGGTCAGCATCGAGGTCAAGGAAGTGGTGAAGC | |
| | CCCTGCTGGTGTCCACCCTCGGTGAGAAGAGCGGGAAAGG | |
| | ACTGAAGACCTGTAAGAGCCCTGGGCGGAAAAGCAAGGAG | |
| | AGCAGCCCCAAGGGGCGCAGCAGCAGCGCCTCCTCACCCC | |
| | CCAAGAAGGAGCACCACCACCATCACCACCACTCAGAGTC | |
| | CCCAAAGGCCCCCGTGCCACTGCTCCCACCCCTGCCCCCA | |
| | CCTCCACCTGAGCCCGAGAGCTCCGAGGACCCCACCAGCC | |
| | CCCCTGAGCCCCAGGACTTGAGCAGCAGCGTCTGCAAAGA | |
| | GGAGAAGATGCCCAGAGGAGGCTCACTGGAGAGCGACGGC | |
| | TGCCCCAAGGAGCCAGCTAAGACTCAGCCCGCGGTTGCCA | |
| | CCGCCGCCACGGCCGCAGAAAAGTACAAACACCGAGGGGA | |
| | GGGAGAGCGCAAAGACATTGTTTCATCCTCCATGCCAAGG | |
| | CCAAACAGAGAGGAGCCTGTGGACAGCCGGACGCCCGTGA | |
| | CCGAGAGAGTTAGCTGA | |
| Mm Mecp2 | gtgagtgggaccgccaaggccgcgggcggggacccttgct | 8 |
| Intron | ggggggcgggtaggggcgggacgtggcgcgggaggggccc | |
| 1 5′ Fragment | gcggggtcgggcgacacggc | |
| Mm Mecp 2 Intron | agccaggggtctcatgtgtggcactcaagctcacctatac | 9 |
| 1 3′ Fragment | tcactactgtgcagacagctgtgttctctgtaatacttac | |
| | atatttgtttaatacttcag | |
| Mm Mecp2 Intron | gtaagtaagagcaagtcttgtgtctatagaacaagaaggc | 10 |
| 3 5′ Fragment | caggtgggtaggaaggctaggatggaaaagctttattgca | |
| | ctgaaatggcttcccaaaaa | |
| Mm Mecp2 Intron | atgtcttagaagaaagcttgtcagcatattttctatctca | 11 |
| 3 3′ Fragment | gtctctatgttgtcaaaaagcttctgactattgtttgtgt | |
| | ctctctgtttgtttctacag | |
| Hs MECP 2 Intron | GTGAGTGGGACCGCCGTGGCCgcgggcggggacccttgcc | 12 |
| 1 5′ Fragment | ggggggcgggggtcaggggcgggacgtggcgcgggagggg | |
| | cccgcggggtCGGACGACAC | |
| Hs MECP 2 Intron | GGGGCCTTGCATGTGGTGGGGGTCCAAGCCTGCCTCTGCT | 13 |
| 1 3′ Fragment | CACTTGTTCTGCAGACTGGCATGTTCTCTGTGATACTTAC | |
| | ATACTTGTTTAACACTTCAG | |
| Hs MECP 2 Intron | GTAAGTAAGAGCAACTCCTATCTCTACAGGGCAGGGAGGG | 14 |
| 3 5′ Fragment | CAGGGACAAGGATCCCTCATGGAGCAGGAAAATGTATGTG | |
| | CCCAGGGTGGGGTCGGGGGG | |
| Hs MECP 2 Intron | TTTGTCAGAGCGTTGTCACCACCATCCGCTCTGCCCTATC | 15 |
| 3 3′ Fragment | TCTGACATTGCTATGGAGAGCCTCTAATTGTTCCTTGTGT | |
| | CTTTCTGTTTGTCCCCACAG | |
| Hs MECP2 3′ | CTTTACACGGAGCGGATTGCAAAGCAAACCAACAAGAATA | 16 |
| UTR Fragments + | AAGGCAGCTGTTGTCTCTTCTCGGCCAGAAGTAGCTTTGC | |
| Distal poly A | ACTTTTCTAAACTAGAATCCAGAAACTTGTTCTTCCAAAG | |
| | CAGAGAGCATTATGACCAAATATCACCAGGACTGTTACTC | |
| | AATGTGTGCCGAAAATGACTGAAAGCACTGATATATTTAA | |
| | AAACAAAAGGCAATTTATTAAGGAAATTTGTACCATTTCA | |
| | GTAAACCTGTCTGAATGTACCTGTATACGTTTCAAAAACA | |
| | ccccccccccACTGAATCCCTGTAACCTATTTATTATATA | |
| | AAGAGTTTGCCTTATAAATTTACATAAAAATGTCCGTTTG | |
| | TGTCTTTTGTTGTAAAAATCAAGTGATTTTTTCATAAGGT | |
| | TCTTTTA | |
| bGH polyA | ctgtgccttctagttgccagccatctgttgtttgcccctc | 17 |
| | ccccgtgccttccttgaccctggaaggtgccactcccact | |
| | gtcctttcctaataaaatgaggaaattgcatcgcattgtc | |
| | tgagtaggtgtcattctattctggggggtggggggggcag | |
| | gacagcaagggggaggattgggaagacaatagcaggcatg | |
| | ctgggga | |
| U7 Core | a(N . . . N)AATTTTTGGAGcaggttttctgacttcggt | 18 |
| Sequence | cggaaaacccct | |
| (N . . . N) denotes | | |
| insertion site of | | |
| ESS and U7 | | |
| targeting | | |
| sequences set | | |
| forth in Table 2 | | |
| AAV2 ITR | cctgcaggcagctgcgcgctcgctcgctcactgaggccgc | 25 |
| | ccgggcaaagcccgggcgtcgggcgacctttggtcgcccg | |
| | gcctcagtgagc ca gagtggccaactccatcactaggg | |
| | gttcct | |

TABLE 2
Sequences of exonic splicing silencers and U7 targeting sequences tested in the
mouse U7 screen and the analogous human targeting sequences based on position
relative to intron/exon junctions.

| | | Mouse U7 Targeting | | | |
|---|---|---|---|---|---|
| | | Sequence (5′ to 3′) | SEQ | Humanized version | SEQ |
| Target | | (Included in Experiments | ID | of U7 Targeting | ID |
| Gene | ID | of Provided Examples) | NO | Sequence (5′ to 3′) | NO |
| N/A | Scramble- | GCCCCTGGCTCGCCTCCTCT | 26 | GCCCCTGGCTCGCCTCCTCT | 122 |
| | 01 | | | | |
| N/A | Scramble- | GGCGGAGGAAACCATCATAT | 27 | GGCGGAGGAAACCATCATAT | 123 |
| | 02 | | | | |
| N/A | Scramble- | GAGACAATAGACCTTAGTAA | 28 | GAGACAATAGACCTTAGTAA | 124 |
| | 03 | | | | |
| N/A | Scramble- | GGCCCACTTCGCGGTGTAAT | 29 | GGCCCACTTCGCGGTGTAAT | 125 |
| | 04 | | | | |
| Mecp2 | e1-3-01 | tcctcctcctccGCtoggcg | 30 | tcctcctcctccGCTcggcg | 126 |
| Mecp2 | e1-3-02 | AGtctctcctcctcgcctcc | 31 | AGtctctcctcctegcctcc | 127 |
| Mecp2 | e1-3-03 | GCCTTGGCGGTCCCACTCAC | 32 | GCCACGGCGGTCCCACTCAC | 128 |
| Mecp2 | e1-3-04 | agcaagggtccccgcCCGCG | 33 | ggcaagggtccccgcccgcG | 129 |
| Mecp2 | e1-3-05 | tcctcctcctccGCtoggcgcggc | 34 | tcctcctcctccGCTcggcgcggc | 130 |
| Mecp2 | e1-3-06 | AGtctctcctcctcgcctectcct | 35 | AGtctctcctcctcgcctectcct | 131 |
| Mecp2 | e1-3-07 | GCCTTGGCGGTCCCACTCACAGtc | 36 | GCCACGGCGGTCCCACTCACAGtc | 132 |
| Mecp2 | e1-3-08 | agcaagggtccccgcCCGCGGCCT | 37 | ggcaagggtccccgcccgcGGCCA | 133 |
| Mecp2 | e1-3-09 | tcctcctcctccGCtcggcgcggcgg | 38 | tcctcctcctccGCTcggcgcggcgg | 134 |
| Mecp2 | e1-3-10 | AGtctctcctcctcgcctcctectcc | 39 | AGtctctcctcctegcctoctoctoc | 135 |
| Mecp2 | e1-3-11 | GCCTTGGCGGTCCCACTCACAGtct | 40 | GCCACGGCGGTCCCACTCACAGtct | 136 |
| | | C | | C | |
| Mecp2 | e1-3-12 | agcaagggtccccgcCCGCGGCCTTG | 41 | ggcaagggtccccgcccgcGGCCACG | 137 |
| Mecp2 | e1-3-13 | tcctcctcctccGCtcggcgcggcggcggc | 42 | tcctcctcctccGCTcggcgcggcggcggc | 138 |
| Mecp2 | e1-3-14 | AGtctctcctcctcgcctcctcctectoct | 43 | AGtctctcctcctcgcctcctcctcctcct | 139 |
| Mecp2 | e1-3-15 | GCCTTGGCGGTCCCACTCACAGtct | 44 | GCCACGGCGGTCCCACTCACAGtct | 140 |
| | | ctcct | | ctcct | |
| Mecp2 | e1-3-16 | agcaagggtccccgcCCGCGGCCTTGGC | 45 | ggcaagggtccccgcccgcGGCCACGGCG | 141 |
| | | GG | | G | |
| Mecp2 | e2-5-01 | AGTTGAAAGTCCCCATTGAG | 46 | AGTTGAAAGCCCCCATTGAG | 142 |
| Mecp2 | e2-5-02 | CTAAAACAAAGAAAATCGTA | 47 | CTAAAACAAAGAAAATTGTA | 143 |
| Mecp2 | e2-5-03 | AGTCTGTATTTTTATGGAGC | 48 | AGTCTGTATTTTTATGGAGC | 144 |
| Mecp2 | e2-5-04 | CATCAAAGCAGGAACTGGTG | 49 | CATCAAAGCAGGAACTGGTG | 145 |
| Mecp2 | e2-5-05 | AGTTGAAAGTCCCCATTGAGCTG | 50 | AGTTGAAAGCCCCCATTGAGCTG | 146 |
| | | C | | C | |
| Mecp2 | e2-5-06 | CTAAAACAAAGAAAATCGTAAGT | 51 | CTAAAACAAAGAAAATTGTAAGT | 147 |
| | | T | | T | |
| Mecp2 | e2-5-07 | AGTCTGTATTTTTATGGAGCCTAA | 52 | AGTCTGTATTTTTATGGAGCCTAA | 148 |
| Mecp2 | e2-5-08 | CATCAAAGCAGGAACTGGTGAGT | 53 | CATCAAAGCAGGAACTGGTGAGT | 149 |
| | | C | | C | |
| Mecp2 | e2-5-09 | AGTTGAAAGTCCCCATTGAGCTG | 54 | AGTTGAAAGCCCCCATTGAGCTG | 150 |
| | | CAC | | CAC | |
| Mecp2 | e2-5-10 | CTAAAACAAAGAAAATCGTAAGT | 55 | CTAAAACAAAGAAAATTGTAAGT | 151 |
| | | TGA | | TGA | |
| Mecp2 | e2-5-11 | AGTCTGTATTTTTATGGAGCCTAA | 56 | AGTCTGTATTTTTATGGAGCCTAA | 152 |
| | | AA | | AA | |
| Mecp2 | e2-5-12 | CATCAAAGCAGGAACTGGTGAGT | 57 | CATCAAAGCAGGAACTGGTGAGT | 153 |
| | | CTG | | CTG | |
| Mecp2 | e2-5-13 | AGTTGAAAGTCCCCATTGAGCTG | 58 | AGTTGAAAGCCCCCATTGAGCTG | 154 |
| | | CACCTTT | | CACGACC | |
| Mecp2 | e2-5-14 | CTAAAACAAAGAAAATCGTAAGT | 59 | CTAAAACAAAGAAAATTGTAAGT | 155 |
| | | TGAAAGT | | TGAAAGC | |
| Mecp2 | e2-5-15 | AGTCTGTATTTTTATGGAGCCTAA | 60 | AGTCTGTATTTTTATGGAGCCTAA | 156 |
| | | AACAAA | | AACAAA | |
| Mecp2 | e2-5-16 | CATCAAAGCAGGAACTGGTGAGT | 61 | CATCAAAGCAGGAACTGGTGAGT | 157 |
| | | CTGTATT | | CTGTATT | |
| Mecp2 | e2-3-01 | TACCATGGAATCCTGTTGGA | 62 | TACCATGGAATCCTGTTGGA | 158 |
| Mecp2 | e2-3-02 | CTGAGCCCTAACATCCCAGC | 63 | CTGAGCCCTAACATCCCAGC | 159 |
| Mecp2 | e2-3-03 | GGAAGGTTACTTACCTGAGC | 64 | GGAAGGTTACTTACCTGAGC | 160 |
| Mecp2 | e2-3-04 | TACCATGGAATCCTGTTGGAGCTG | 65 | TACCATGGAATCCTGTTGGAGCTG | 161 |
| Mecp2 | e2-3-05 | CTGAGCCCTAACATCCCAGCTACC | 66 | CTGAGCCCTAACATCCCAGCTACC | 162 |
| Mecp2 | e2-3-06 | aGGAAGGTTACTTACCTGAGCCCT | 67 | aGGAAGGTTACTTACCTGAGCCCT | 163 |
| Mecp2 | e2-3-07 | TACCATGGAATCCTGTTGGAGCTG | 68 | TACCATGGAATCCTGTTGGAGCTG | 164 |
| | | GT | | GT | |
| Mecp2 | e2-3-08 | CTGAGCCCTAACATCCCAGCTACC | 69 | CTGAGCCCTAACATCCCAGCTACC | 165 |
| | | AT | | AT | |
| Mecp2 | e2-3-09 | aGGAAGGTTACTTACCTGAGCCCT | 70 | aGGAAGGTTACTTACCTGAGCCCT | 166 |
| | | AA | | AA | |
| Mecp2 | e2-3-10 | TACCATGGAATCCTGTTGGAGCTG | 71 | TACCATGGAATCCTGTTGGAGCTG | 167 |
| | | GTCTAC | | GTCTAC | |
| Mecp2 | e2-3-11 | CTGAGCCCTAACATCCCAGCTACC | 72 | CTGAGCCCTAACATCCCAGCTACC | 168 |
| | | ATGGAA | | ATGGAA | |
| Mecp2 | e2-3-12 | aaGGAAGGTTACTTACCTGAGCCC | 73 | aaGGAAGGTTACTTACCTGAGCCC | 169 |
| | | TAACAT | | TAACAT | |
| Mecp2 | e3-5-01 | GTAAGTATTACAGAGAACAC | 74 | GTAAGTATCACAGAGAACAT | 170 |
| Mecp2 | e3-5-02 | CTGAAGTATTAAACAAATAT | 75 | CTGAAGTGTTAAACAAGTAT | 171 |
| Mecp2 | e3-5-03 | GGTCTTCTGACTTTTCCTCC | 76 | GGTCTTCTGACTTTTCTTCC | 172 |
| Mecp2 | e3-5-04 | TCTGAGGCCCTGGAGATCCT | 77 | CTTGAGGCCCTGGAGGTCCT | 173 |
| Mecp2 | e3-5-05 | GTAAGTATTACAGAGAACACAGC | 78 | GTAAGTATCACAGAGAACATGCC | 174 |
| | | T | | A | |
| Mecp2 | e3-5-06 | CTGAAGTATTAAACAAATATGTA | 79 | CTGAAGTGTTAAACAAGTATGTA | 175 |
| | | A | | A | |
| Mecp2 | e3-5-07 | GGTCTTCTGACTTTTCCTCCCTGA | 80 | GGTCTTCTGACTTTTCTTCCCTGA | 176 |
| Mecp2 | e3-5-08 | TCTGAGGCCCTGGAGATCCTGGTC | 81 | CTTGAGGCCCTGGAGGTCCTGGTC | 177 |
| Mecp2 | e3-5-09 | GTAAGTATTACAGAGAACACAGC | 82 | GTAAGTATCACAGAGAACATGCC | 178 |
| | | TGT | | AGT | |
| Mecp2 | e3-5-10 | CTGAAGTATTAAACAAATATGTA | 83 | CTGAAGTGTTAAACAAGTATGTA | 179 |
| | | AGT | | AGT | |
| Mecp2 | e3-5-11 | GGTCTTCTGACTTTTCCTCCCTGA | 84 | GGTCTTCTGACTTTTCTTCCCTGA | 180 |
| | | AG | | AG | |
| Mecp2 | e3-5-12 | TCTGAGGCCCTGGAGATCCTGGTC | 85 | CTTGAGGCCCTGGAGGTCCTGGTC | 181 |
| | | TT | | TT | |
| Mecp2 | e3-5-13 | GTAAGTATTACAGAGAACACAGC | 86 | GTAAGTATCACAGAGAACATGCC | 182 |
| | | TGTCTGC | | AGTCTGC | |
| Mecp2 | e3-5-14 | CTGAAGTATTAAACAAATATGTA | 87 | CTGAAGTGTTAAACAAGTATGTA | 183 |
| | | AGTATTA | | AGTATCA | |
| Mecp2 | e3-5-15 | GGTCTTCTGACTTTTCCTCCCTGA | 88 | GGTCTTCTGACTTTTCTTCCCTGA | 184 |
| | | AGTATT | | AGTGTT | |
| Mecp2 | e3-5-16 | TCTGAGGCCCTGGAGATCCTGGTC | 89 | CTTGAGGCCCTGGAGGTCCTGGTC | 185 |
| | | TTCTGA | | TTCTGA | |
| Mecp2 | e3-3-01 | CTTTCCAGCAGATCGGCCAG | 90 | CTTCCCAGCAGAGCGGCCAG | 186 |
| Mecp2 | e3-3-02 | TTGATCAAATATACATCATA | 91 | TTGATCAAATACACATCATA | 187 |
| Mecp2 | e3-3-03 | CAAGACTTGCTCTTACTTAC | 92 | TAGGAGTTGCTCTTACTTAC | 188 |
| Mecp2 | e3-3-04 | GCCTTCTTGTTCTATAGACA | 93 | CCCTCCCTGCCCTGTAGAGA | 189 |
| Mecp2 | e3-3-05 | CTTTCCAGCAGATCGGCCAGACTT | 94 | CTTCCCAGCAGAGCGGCCAGATTT | 190 |
| Mecp2 | e3-3-06 | TTGATCAAATATACATCATACTTT | 95 | TTGATCAAATACACATCATACTTC | 191 |
| Mecp2 | e3-3-07 | CAAGACTTGCTCTTACTTACTTGA | 96 | TAGGAGTTGCTCTTACTTACTTGA | 192 |
| Mecp2 | e3-3-08 | GCCTTCTTGTTCTATAGACACAAG | 97 | CCCTCCCTGCCCTGTAGAGATAGG | 193 |
| Mecp2 | e3-3-09 | CTTTCCAGCAGATCGGCCAGACTT | 98 | CTTCCCAGCAGAGCGGCCAGATTT | 194 |
| | | CC | | CC | |
| Mecp2 | e3-3-10 | TTGATCAAATATACATCATACTTT | 99 | TTGATCAAATACACATCATACTTC | 195 |
| | | CC | | CC | |
| Mecp2 | e3-3-11 | CAAGACTTGCTCTTACTTACTTGA | 100 | TAGGAGTTGCTCTTACTTACTTGA | 196 |
| | | TC | | TC | |
| Mecp2 | e3-3-12 | GCCTTCTTGTTCTATAGACACAAG | 101 | CCCTCCCTGCCCTGTAGAGATAGG | 197 |
| | | AC | | AG | |
| Mecp2 | e3-3-13 | CTTTCCAGCAGATCGGCCAGACTT | 102 | CTTCCCAGCAGAGCGGCCAGATTT | 198 |
| | | CCTTTG | | CCTTTG | |
| Mecp2 | e3-3-14 | TTGATCAAATATACATCATACTTT | 103 | TTGATCAAATACACATCATACTTC | 199 |
| | | CCAGCA | | CCAGCA | |
| Mecp2 | e3-3-15 | CAAGACTTGCTCTTACTTACTTGA | 104 | TAGGAGTTGCTCTTACTTACTTGA | 200 |
| | | TCAAAT | | TCAAAT | |
| Mecp2 | e3-3-16 | GCCTTCTTGTTCTATAGACACAAG | 105 | CCCTCCCTGCCCTGTAGAGATAGG | 201 |
| | | ACTTGC | | AGTTGC | |
| Mecp2 | e4-5-01 | ACACAAACAATAGTCAGAAG | 106 | ACACAAGGAACAATTAGAGG | 202 |
| Mecp2 | e4-5-02 | CTGTAGAAACAAACAGAGAG | 107 | CTGTGGGGACAAACAGAAAG | 203 |
| Mecp2 | e4-5-03 | GAAAAGCTTTTCCCTGGGGA | 108 | GAAAGGCTTTTCCCTGGGGA | 204 |
| Mecp2 | e4-5-04 | AATCAATTCTACTTTAGAGC | 109 | AATCAACTCCACTTTAGAGC | 205 |
| Mecp2 | e4-5-05 | ACACAAACAATAGTCAGAAGCTT | 110 | ACACAAGGAACAATTAGAGGCTC | 206 |
| | | T | | T | |
| Mecp2 | e4-5-06 | CTGTAGAAACAAACAGAGAGACA | 111 | CTGTGGGGACAAACAGAAAGACA | 207 |
| | | C | | C | |
| Mecp2 | e4-5-07 | GAAAAGCTTTTCCCTGGGGACTGT | 112 | GAAAGGCTTTTCCCTGGGGACTGT | 208 |
| Mecp2 | e4-5-08 | AATCAATTCTACTTTAGAGCGAA | 113 | AATCAACTCCACTTTAGAGCGAA | 209 |
| | | A | | A | |
| Mecp2 | e4-5-09 | ACACAAACAATAGTCAGAAGCTT | 114 | ACACAAGGAACAATTAGAGGCTC | 210 |
| | | TTT | | TCC | |
| Mecp2 | e4-5-10 | CTGTAGAAACAAACAGAGAGACA | 115 | CTGTGGGGACAAACAGAAAGACA | 211 |
| Mecp2 | e4-5-11 | GAAAAGCTTTTCCCTGGGGACTGT | 116 | GAAAGGCTTTTCCCTGGGGACTGT | 212 |
| | | AG | | GG | |
| Mecp2 | e4-5-12 | AATCAATTCTACTTTAGAGCGAA | 117 | AATCAACTCCACTTTAGAGCGAA | 213 |
| | | AAG | | AGG | |
| Mecp2 | e4-5-13 | ACACAAACAATAGTCAGAAGCTT | 118 | ACACAAGGAACAATTAGAGGCTC | 214 |
| | | TTTGACA | | TCCATAG | |
| Mecp2 | e4-5-14 | CTGTAGAAACAAACAGAGAGACA | 119 | CTGTGGGGACAAACAGAAAGACA | 215 |
| | | CAAACAA | | CAAGGAA | |
| Mecp2 | e4-5-15 | GAAAAGCTTTTCCCTGGGGACTGT | 120 | GAAAGGCTTTTCCCTGGGGACTGT | 216 |
| | | AGAAAC | | GGGGAC | |
| Mecp2 | e4-5-16 | AATCAATTCTACTTTAGAGCGAA | 121 | AATCAACTCCACTTTAGAGCGAA | 217 |
| | | AAGCTTT | | AGGCTTT | |

TABLE 3
Sequences of intron/exon junction regions targeted with U7 in mouse and the homologous
regions targeted in human. Expanded regions including 100nt upstream and downstream
of each intron/exon junction are shown, except in the case of exon 2, where the
region comprises 100 nt upstream, 100 nt downstream, and the entirety of exon 2.

| | | | SEQ |
|---|---|---|---|
| | | | ID |
| Sequence Name | Region | Sequence (5′ to 3′) | NO |
| MmMecp2_Exon1-3 | Exon 1/Intron 1 | gccgccgccgcgccgaGCggaggaggaggaggaggcgaggagg | 218 |
| | Junction | agagaCTGTGAGTGGGACCGCCAAGGCCGCGG | |
| | | gcggggacccttgct | |
| MmMecp2_Exon2-5 | Intron 1/Exon 2 | AAAGGTGCAGCTCAATGGGGACTTTCAACTT | 219 |
| | Junction | ACGATTTTCTTTGTTTTAGGCTCCATAAAAAT | |
| | | ACAGACTCACCAGTTCCTGCTTTGATG | |
| MmMecp2_Exon2-3 | Exon 2/Intron 2 | GTAGACCAGCTCCAACAGGATTCCATGGTAG | 220 |
| | Junction | CTGGGATGTTAGGGCTCAGGTAAGTAACCTT | |
| | | CCtt | |
| MmMecp2_Exon3-5 | Intron 2/Exon 3 | GCAGACAGCTGTGTTCTCTGTAATACTTACA | 221 |
| | Junction | TATTTGTTTAATACTTCAGGGAGGAAAAGTC | |
| | | AGAAGACCAGGATCTCCAGGGCCTCAGA | |
| MmMecp2_Exon3-3 | Exon 3/Intron 3 | CAAAGGAAGTCTGGCCGATCTGCTGGAAAG | 222 |
| | Junction | TATGATGTATATTTGATCAAGTAAGTAAGAG | |
| | | CAAGTCTTGTGTCTATAGAACAAGAAGGC | |
| MmMecp2_Exon4-5 | Intron 3/Exon 4 | TGTCAAAAAGCTTCTGACTATTGTTTGTGTCT | 223 |
| | Junction | CTCTGTTTGTTTCTACAGTCCCCAGGGAAAA | |
| | | GCTTTTCGCTCTAAAGTAGAATTGATT | |
| HsMecp2_Exon1-3 | Exon 1/Intron 1 | gccgccgccgcgccgAGCggaggaggaggaggaggcg | 224 |
| | Junction | aggaggagagaCTGTGAGTGGGACCGCCGTGGCCgcg | |
| | | ggcggggacccttgcc | |
| HsMecp2_Exon2-5 | Intron 1/Exon 2 | GGTCGTGCAGCTCAATGGGGGCTTTCAACTT | 225 |
| | Junction | ACAATTTTCTTTGTTTTAGGCTCCATAAAAAT | |
| | | ACAGACTCACCAGTTCCTGCTTTGATG | |
| HsMecp2_Exon2-3 | Exon 2/Intron 2 | GTAGACCAGCTCCAACAGGATTCCATGGTAG | 226 |
| | Junction | CTGGGATGTTAGGGCTCAGGTAAGTAACCTT | |
| | | CCtt | |
| HsMecp2_Exon3-5 | Intron 2/Exon 3 | GCAGACTGGCATGTTCTCTGTGATACTTACA | 227 |
| | Junction | TACTTGTTTAACACTTCAGGGAAGAAAAGTC | |
| | | AGAAGACCAGGACCTCCAGGGCCTCAAG | |
| HsMecp2_Exon3-3 | Exon 3/Intron 3 | CAAAGGAAATCTGGCCGCTCTGCTGGGAAG | 228 |
| | Junction | TATGATGTGTATTTGATCAAGTAAGTAAGAG | |
| | | CAACTCCTATCTCTACAGGGCAGGGAGGG | |
| HsMecp2_Exon4-5 | Intron 3/Exon 4 | CTATGGAGAGCCTCTAATTGTTCCTTGTGTCT | 229 |
| | Junction | TTCTGTTTGTCCCCACAGTCCCCAGGGAAAA | |
| | | GCCTTTCGCTCTAAAGTGGAGTTGATT | |
| MmMecp2_Exon1- | Exon 1/Intron 1 | CTGTGGTAAAACCCGTCCGGAAAATGgccgccgctgcc | 230 |
| 3_Extended | Junction | gccaccgccgccgccgccgccgcgccgaGCggaggaggag | |
| | | gaggaggcgaggaggagagaCTGTGAGTGGGACCGCC | |
| | | AAGGCCGCGGgcggggacccttgctgggggggggtagggg | |
| | | cgggacgtggcgcgggaggggcccgcggggTCGGGCGACA | |
| | | CGGC | |
| MmMecp2_Exon2 | Intron 1/Exon 2/ | ACATAGTATGTTGTCTGTTTATCTTCAGAAT | 231 |
| | Intron 2 | GTTCCAAAAAGCCTTGGGAAAAGGTGCAGC | |
| | | TCAATGGGGACTTTCAACTTACGATTTTCTTT | |
| | | GTTTTAGGCTCCATAAAAATACAGACTCACC | |
| | | AGTTCCTGCTTTGATGTGACATGTGACTCCC | |
| | | CAGAATACACCTTGCTTCTGTAGACCAGCTC | |
| | | CAACAGGATTCCATGGTAGCTGGGATGTTAG | |
| | | GGCTCAGGTAAGTAACCTTCCtttttttttttttAGTAT | |
| | | ATGTCCTGGTTTGGCCATCTGTTTTTaaaaaaaaa | |
| | | aaaaaggaaaaaaaGATATACTATTCTTGGACA | |
| MmMecp2_Exon3- | Intron 2/Exon 3 | AGCCAGGGGTCTCATGTGTGGCACTCAAGCT | 232 |
| 5_Extended | Junction | CACCTATACTCACTACTGTGCAGACAGCTGT | |
| | | GTTCTCTGTAATACTTACATATTTGTTTAATA | |
| | | CTTCAGGGAGGAAAAGTCAGAAGACCAGGA | |
| | | TCTCCAGGGCCTCAGAGACAAGCCACTGAA | |
| | | GTTTAAGAAGGCGAAGAAAGACAAGAAGGA | |
| | | GGACAAAGAAGGCAAG | |
| MmMecp2_Exon3- | Exon 3/Intron 3 | CTATGTATGATGACCCCACCTTGCCTGAAGG | 233 |
| 3_Extended | Junction | TTGGACACGAAAGCTTAAACAAAGGAAGTC | |
| | | TGGCCGATCTGCTGGAAAGTATGATGTATAT | |
| | | TTGATCAAGTAAGTAAGAGCAAGTCTTGTGT | |
| | | CTATAGAACAAGAAGGCCAGGTGGGTAGGA | |
| | | AGGCTAGGATGGAAAAGCTTTATTGCACTGA | |
| | | AATGGCTTCCCAAAAA | |
| MmMecp2_Exon4- | Intron 3/Exon 4 | ATGTCTTAGAAGAAAGCTTGTCAGCATATTT | 234 |
| 5_Extended | Junction | TCTATCTCAGTCTCTATGTTGTCAAAAAGCTT | |
| | | CTGACTATTGTTTGTGTCTCTCTGTTTGTTTC | |
| | | TACAGTCCCCAGGGAAAAGCTTTTCGCTCTA | |
| | | AAGTAGAATTGATTGCATACTTTGAAAAGGT | |
| | | GGGAGACACCTCCTTGGACCCTAATGATTTT | |
| | | GACTTCACGGTA | |
| HsMecp2_Exon1- | Exon 1/Intron 1 | CTCTCGGAGAGAGGGCTGTGGTAAAAGCCG | 235 |
| 3_Extended | Junction | TCCGGAAAATGgccgccgccgccgccgccgcgccgAGC | |
| | | ggaggaggaggaggaggcgaggaggagagaCTGTGAGTGG | |
| | | GACCGCCGTGGCCgcgggcggggacccttgccggggggc | |
| | | gggggtcaggggcgggacgtggcgcgggaggggcccgcgg | |
| | | ggtCGGACGACAC | |
| HsMecp2_Exon2 | Intron 1/Exon 2/ | CTTTGTCTATGTGTTTATCTTCAAAATGTCCC | 236 |
| | Intron 2 | AAATAGCCCTGGGAAAAAGGTCGTGCAGCT | |
| | | CAATGGGGGCTTTCAACTTACAATTTTCTTT | |
| | | GTTTTAGGCTCCATAAAAATACAGACTCACC | |
| | | AGTTCCTGCTTTGATGTGACATGTGACTCCC | |
| | | CAGAATACACCTTGCTTCTGTAGACCAGCTC | |
| | | CAACAGGATTCCATGGTAGCTGGGATGTTAG | |
| | | GGCTCAGGTAAGTAACCTTCCtttttttttttttAGTAT | |
| | | ATGTCCTGGTTTGGCCATCTGTTTTTTTTTTT | |
| | | TTTaaaaaaaaaaaaaaaaggaaaagaggaaaaaaa | |
| HsMecp2_Exon3- | Intron 2/Exon 3 | GGGGCCTTGCATGTGGTGGGGGTCCAAGCCT | 237 |
| 5_Extended | Junction | GCCTCTGCTCACTTGTTCTGCAGACTGGCAT | |
| | | GTTCTCTGTGATACTTACATACTTGTTTAACA | |
| | | CTTCAGGGAAGAAAAGTCAGAAGACCAGGA | |
| | | CCTCCAGGGCCTCAAGGACAAACCCCTCAA | |
| | | GTTTAAAAAGGTGAAGAAAGATAAGAAAGA | |
| | | AGAGAAAGAGGGCAAG | |
| HsMecp2_Exon3- | Exon 3/Intron 3 | CCATGTATGATGACCCCACCCTGCCTGAAGG | 238 |
| 3_Extended | Junction | CTGGACACGGAAGCTTAAGCAAAGGAAATC | |
| | | TGGCCGCTCTGCTGGGAAGTATGATGTGTAT | |
| | | TTGATCAAGTAAGTAAGAGCAACTCCTATCT | |
| | | CTACAGGGCAGGGAGGGCAGGGACAAGGAT | |
| | | CCCTCATGGAGCAGGAAAATGTATGTGCCCA | |
| | | GGGTGGGGTCGGGGGG | |
| HsMecp2_Exon4- | Intron 3/Exon 4 | TTTGTCAGAGCGTTGTCACCACCATCCGCTC | 239 |
| 5_Extended | Junction | TGCCCTATCTCTGACATTGCTATGGAGAGCC | |
| | | TCTAATTGTTCCTTGTGTCTTTCTGTTTGTCC | |
| | | CCACAGTCCCCAGGGAAAAGCCTTTCGCTCT | |
| | | AAAGTGGAGTTGATTGCGTACTTCGAAAAG | |
| | | GTAGGCGACACATCCCTGGACCCTAATGATT | |
| | | TTGACTTCACGGTA | |

TABLE 4
Exemplary components of the expression
system provided herein.

| | | SEQ |
|---|---|---|
| | | ID |
| Sequence Name | Sequence (5′ to 3′) | NO |
| ESS | ATGATAGGGACTTAGGGTGA | 240 |
| ESS | TTTGTTCCGTGGGTGGTTTA | 241 |
| ESS | TGGGGGGAGGTAGGTAGGTA | 242 |
| Sm binding site | AAUUUGUCUAG | 243 |
| Sm binding | AAUUUUUGGAG | 244 |
| site (smOPT) | | |

TABLE 5
Sequences of exemplary components of the
expressing system described herein.

| Sequence | | SEQ ID |
|---|---|---|
| Name | Sequence | NO. |
| MmCandidate-02 | ggcctccgcgccgggttttggcgcctcccgcgggcgcccccctcc | 245 |
| | tcacggcgagcgctgccacgtcagacgaagggcgcagcgagcgtc | |
| | ctgatccttccgcccggacgctcaggacagcggcccgctgctcat | |
| | aagactcggccttagaaccccagtatcagcagaaggacattttag | |
| | gacgggacttgggtgactctagggcactggttttctttccagaga | |
| | gcggaacaggcgaggaaaagtagtcccttctcggcgattctgcgg | |
| | agggatctccgtggggcggtgaacgccgatgattatataaggacg | |
| | cgccgggtgtggcacagctagttccgtcgcagccgggatttgggt | |
| | cgcggttcttgtttgtggatcgctgtgatcgtcacttggtCGGTA | |
| | AGTTTAGTCTTTTTGTCTTTTATTTCAGGTCCCGGATCCGGTGGT | |
| | GGTGCAAATCAAAGAACTGCTCCTCAGTGGATGTTGCCTTTACTT | |
| | CTAGGCGCGCGCGCTCCCTCCTCTCGGAGAGAGGGCTGTGGTAAA | |
| | AGCCGTCCGGAAAATGTACCCATACGATGTTCCAGATTACGCTcc | |
| | taggggaggcggaggcATGGCCGCCGCTGCCGCCACCGCCGCCGC | |
| | CGCCGCCGCGCCGAGCGGAGGAGGAGGAGGAGGCGAGGAGGAGAG | |
| | ACTGGAGGAAAAGTCAGAAGACCAGGATCTCCAGGGCCTCAGAGA | |
| | CAAGCCACTGAAGTTTAAGAAGGCGAAGAAAGACAAGAAGGAGGA | |
| | CAAAGAAGGCAAGCATGAGCCACTACAACCTTCAGCCCACCATTC | |
| | TGCAGAGCCAGCAGAGGCAGGCAAAGCAGAAACATCAGAAAGCTC | |
| | AGGCTCTGCCCCAGCAGTGCCAGAAGCCTCGGCTTCCCCCAAACA | |
| | GCGGCGCTCCATTATCCGTGACCGGGGACCTATGTATGATGACCC | |
| | CACCTTGCCTGAAGGTTGGACACGAAAGCTTAAACAAAGGAAGTC | |
| | TGGCCGATCTGCTGGAAAGTATGATGTATATTTGATCAATCCCCA | |
| | GGGAAAAGCTTTTCGCTCTAAAGTAGAATTGATTGCATACTTTGA | |
| | AAAGGTGGGAGACACCTCCTTGGACCCTAATGATTTTGACTTCAC | |
| | GGTAACTGGGAGAGGGAGCCCCTCCAGGAGAGAGCAGAAACCACC | |
| | TAAGAAGCCCAAATCTCCCAAAGCTCCAGGAACTGGCAGGGGTCG | |
| | GGGACGCCCCAAAGGGAGCGGCACTGGGAGACCAAAGGCAGCAGC | |
| | ATCAGAAGGTGTTCAGGTGAAAAGGGTCCTGGAGAAGAGCCCTGG | |
| | GAAACTTGTTGTCAAGATGCCTTTCCAAGCATCGCCTGGGGGTAA | |
| | GGGTGAGGGAGGTGGGGCTACCACATCTGCCCAGGTCATGGTGAT | |
| | CAAACGCCCTGGCAGAAAGCGAAAAGCTGAAGCTGACCCCCAGGC | |
| | CATTCCTAAGAAACGGGGTAGAAAGCCTGGGAGTGTGGTGGCAGC | |
| | TGCTGCAGCTGAGGCCAAAAAGAAAGCCGTGAAGGAGTCTTCCAT | |
| | ACGGTCTGTGCATGAGACTGTGCTCCCCATCAAGAAGCGCAAGAC | |
| | CCGGGAGACGGTCAGCATCGAGGTCAAGGAAGTGGTGAAGCCCCT | |
| | GCTGGTGTCCACCCTTGGTGAGAAAAGCGGGAAGGGACTGAAGAC | |
| | CTGCAAGAGCCCTGGGCGTAAAAGCAAGGAGAGCAGCCCCAAGGG | |
| | GCGCAGCAGCAGTGCCTCCTCCCCACCTAAGAAGGAGCACCATCA | |
| | TCACCACCATCACTCAGAGTCCACAAAGGCCCCCATGCCACTGCT | |
| | CCCATCCCCACCCCCACCTGAGCCTGAGAGCTCTGAGGACCCCAT | |
| | CAGCCCCCCTGAGCCTCAGGACTTGAGCAGCAGCATCTGCAAAGA | |
| | AGAGAAGATGCCCCGAGGAGGCTCACTGGAAAGCGATGGCTGCCC | |
| | CAAGGAGCCAGCTAAGACTCAGCCTATGGTCGCCACCACTACCAC | |
| | AGTTGCAGAAAAGTACAAACACCGAGGGGAGGGAGAGCGCAAAGA | |
| | CATTGTTTCATCTTCCATGCCAAGGCCAAACAGAGAGGAGCCTGT | |
| | GGACAGCCGGACGCCCGTGACCGAGAGAGTTAGCTGACTTTACAC | |
| | GGAGCGGATTGCAAAGCAAACCAACAAGAATAAAGGCAGCTGTTG | |
| | TCTCTTCTCGGCCAGAAGTAGCTTTGCACTTTTCTAAACTAGAAT | |
| | CCAGAAACTTGTTCTTCCAAAGCAGAGAGCATTATGACCAAATAT | |
| | CACCAGGACTGTTACTCAATGTGTGCCGAAAATGACTGAAAGCAC | |
| | TGATATATTTAAAAACAAAAGGCAATTTATTAAGGAAATTTGTAC | |
| | CATTTCAGTAAACCTGTCTGAATGTACCTGTATACGTTTCAAAAA | |
| | CAccccccccccACTGAATCCCTGTAACCTATTTATTATATAAAG | |
| | AGTTTGCCTTATAAATTTACATAAAAATGTCCGTTTGTGTCTTTT | |
| | GTTGTAAAAATCAAGTGATTTTTTCATAAGGTTCTTTTAgcatgc | |
| | TAAAGACTGTGCATCCGACTCCTACATTTATGAAAGTAAATGCCT | |
| | ATTGTTAGAACAAAAAAGGCTACAGAACAAAAAACAAAGCGAAAT | |
| | ACCATCTGCTTTAGGTTCAGTGGTATTTTCCCGCTGACAGGGAGG | |
| | CGGGTTTTTGGGTACAGGAAACGAGTCACTATGGAGGCGGTACTA | |
| | TGTAGATGAGAATTCAGGAGCAAACTGGGAAAAGCAACTGCTTCC | |
| | AAATATTTGTGATTTTTACAGTGTAGTTTTGGAAAAACTCTTAGC | |
| | CTACCAATTCTTCTAAGTGTTTTAAAATGTGGGAGCCAGTACACA | |
| | TGAAGTTATAGAGTGTTTTAATGAGGCTTAAATATTTACCGTAAC | |
| | TATGAAATGCTACGCATATCATGCTGTTCAGGCTCCGTGGCCACG | |
| | CAACTCaATGATAGGGACTTAGGGTGAagcaagggtccccgcCCG | |
| | CGGCCTTGGCGGAATTTTTGGAGcaggttttctgacttcggtcgg | |
| | aaaacccctcccaatttcactgGTCTACAATGAAAgcaaaacagt | |
| | tctcttccccgctccccggtgtgctagggaaacgcgtatctgTCT | |
| | GAGTCGACCAAGGACACAATCGAGCTCCGATCCGTACTGTCGAGA | |
| | AACTTGTATCCGTAAAGACTGTGCATCCGACTCCTACATTTATGA | |
| | AAGTAAATGCCTATTGTTAGAACAAAAAAGGCTACAGAACAAAAA | |
| | ACAAAGCGAAATACCATCTGCTTTAGGTTCAGTGGTATTTTCCCG | |
| | CTGACAGGGAGGCGGGTTTTTGGGTACAGGAAACGAGTCACTATG | |
| | GAGGCGGTACTATGTAGATGAGAATTCAGGAGCAAACTGGGAAAA | |
| | GCAACTGCTTCCAAATATTTGTGATTTTTACAGTGTAGTTTTGGA | |
| | AAAACTCTTAGCCTACCAATTCTTCTAAGTGTTTTAAAATGTGGG | |
| | AGCCAGTACACATGAAGTTATAGAGTGTTTTAATGAGGCTTAAAT | |
| | ATTTACCGTAACTATGAAATGCTACGCATATCATGCTGTTCAGGC | |
| | TCCGTGGCCACGCAACTCaATGATAGGGACTTAGGGTGAagcaag | |
| | ggtccccgcCCGCGGCCTTGGCGGAATTTTTGGAGcaggttttct | |
| | gacttcggtcggaaaacccctcccaatttcactgGTCTACAATGA | |
| | AAgcaaaacagttctcttccccgctccccggtgtgctagggaaac | |
| | gcgtatctgTGAGCGTTCCCAGCACTTCAGCCAAGGAAGCTACCA | |
| | ATTTTTAGTTTCCGAGTGTCACGTTAAAGACTGTGCATCCGACTC | |
| | CTACATTTATGAAAGTAAATGCCTATTGTTAGAACAAAAAAGGCT | |
| | ACAGAACAAAAAACAAAGCGAAATACCATCTGCTTTAGGTTCAGT | |
| | GGTATTTTCCCGCTGACAGGGAGGCGGGTTTTTGGGTACAGGAAA | |
| | CGAGTCACTATGGAGGCGGTACTATGTAGATGAGAATTCAGGAGC | |
| | AAACTGGGAAAAGCAACTGCTTCCAAATATTTGTGATTTTTACAG | |
| | TGTAGTTTTGGAAAAACTCTTAGCCTACCAATTCTTCTAAGTGTT | |
| | TTAAAATGTGGGAGCCAGTACACATGAAGTTATAGAGTGTTTTAA | |
| | TGAGGCTTAAATATTTACCGTAACTATGAAATGCTACGCATATCA | |
| | TGCTGTTCAGGCTCCGTGGCCACGCAACTCaATGATAGGGACTTA | |
| | GGGTGAagcaagggtccccgcCCGCGGCCTTGGCGGAATTTTTGG | |
| | AGcaggttttctgacttcggtcggaaaacccctcccaatttcact | |
| | gGTCTACAATGAAAgc | |
| HsCandidate-02-1 | ggcctccgcgccgggttttggcgcctcccgcgggcgcccccctcc | 246 |
| | tcacggcgagcgctgccacgtcagacgaagggcgcagcgagcgtc | |
| | ctgatccttccgcccggacgctcaggacagcggcccgctgctcat | |
| | aagactcggccttagaaccccagtatcagcagaaggacattttag | |
| | gacgggacttgggtgactctagggcactggttttctttccagaga | |
| | gcggaacaggcgaggaaaagtagtcccttctcggcgattctgcgg | |
| | agggatctccgtggggcggtgaacgccgatgattatataaggacg | |
| | cgccgggtgtggcacagctagttccgtcgcagccgggatttgggt | |
| | cgcggttcttgtttgtggatcgctgtgatcgtcacttggtCGGTA | |
| | AGTTTAGTCTTTTTGTCTTTTATTTCAGGTCCCGGATCCGGTGGT | |
| | GGTGCAAATCAAAGAACTGCTCCTCAGTGGATGTTGCCTTTACTT | |
| | CTAGGCGCGCGCGCTCCCTCCTCTCGGAGAGAGGGCTGTGGTAAA | |
| | AGCCGTCCGGAAAATGATGGCCGCCGCCGCCGCCGCCGCGCCGAG | |
| | CGGAGGAGGAGGAGGAGGCGAGGAGGAGAGACTGGAAGAAAAGTC | |
| | AGAAGACCAGGACCTCCAGGGCCTCAAGGACAAACCCCTCAAGTT | |
| | TAAAAAGGTGAAGAAAGATAAGAAAGAAGAGAAAGAGGGCAAGCA | |
| | TGAGCCCGTGCAGCCATCAGCCCACCACTCTGCTGAGCCCGCAGA | |
| | GGCAGGCAAAGCAGAGACATCAGAAGGGTCAGGCTCCGCCCCGGC | |
| | TGTGCCGGAAGCTTCTGCCTCCCCCAAACAGCGGCGCTCCATCAT | |
| | CCGTGACCGGGGACCCATGTATGATGACCCCACCCTGCCTGAAGG | |
| | CTGGACACGGAAGCTTAAGCAAAGGAAATCTGGCCGCTCTGCTGG | |
| | GAAGTATGATGTGTATTTGATCAATCCCCAGGGAAAAGCCTTTCG | |
| | CTCTAAAGTGGAGTTGATTGCGTACTTCGAAAAGGTAGGCGACAC | |
| | ATCCCTGGACCCTAATGATTTTGACTTCACGGTAACTGGGAGAGG | |
| | GAGCCCCTCCCGGCGAGAGCAGAAACCACCTAAGAAGCCCAAATC | |
| | TCCCAAAGCTCCAGGAACTGGCAGAGGCCGGGGACGCCCCAAAGG | |
| | GAGCGGCACCACGAGACCCAAGGCGGCCACGTCAGAGGGTGTGCA | |
| | GGTGAAAAGGGTCCTGGAGAAAAGTCCTGGGAAGCTCCTTGTCAA | |
| | GATGCCTTTTCAAACTTCGCCAGGGGGCAAGGCTGAGGGGGGTGG | |
| | GGCCACCACATCCACCCAGGTCATGGTGATCAAACGCCCCGGCAG | |
| | GAAGCGAAAAGCTGAGGCCGACCCTCAGGCCATTCCCAAGAAACG | |
| | GGGCCGAAAGCCGGGGAGTGTGGTGGCAGCCGCTGCCGCCGAGGC | |
| | CAAAAAGAAAGCCGTGAAGGAGTCTTCTATCCGATCTGTGCAGGA | |
| | GACCGTACTCCCCATCAAGAAGCGCAAGACCCGGGAGACGGTCAG | |
| | CATCGAGGTCAAGGAAGTGGTGAAGCCCCTGCTGGTGTCCACCCT | |
| | CGGTGAGAAGAGCGGGAAAGGACTGAAGACCTGTAAGAGCCCTGG | |
| | GCGGAAAAGCAAGGAGAGCAGCCCCAAGGGGCGCAGCAGCAGCGC | |
| | CTCCTCACCCCCCAAGAAGGAGCACCACCACCATCACCACCACTC | |
| | AGAGTCCCCAAAGGCCCCCGTGCCACTGCTCCCACCCCTGCCCCC | |
| | ACCTCCACCTGAGCCCGAGAGCTCCGAGGACCCCACCAGCCCCCC | |
| | TGAGCCCCAGGACTTGAGCAGCAGCGTCTGCAAAGAGGAGAAGAT | |
| | GCCCAGAGGAGGCTCACTGGAGAGCGACGGCTGCCCCAAGGAGCC | |
| | AGCTAAGACTCAGCCCGCGGTTGCCACCGCCGCCACGGCCGCAGA | |
| | AAAGTACAAACACCGAGGGGAGGGAGAGCGCAAAGACATTGTTTC | |
| | ATCCTCCATGCCAAGGCCAAACAGAGAGGAGCCTGTGGACAGCCG | |
| | GACGCCCGTGACCGAGAGAGTTAGCTGACTTTACACGGAGCGGAT | |
| | TGCAAAGCAAACCAACAAGAATAAAGGCAGCTGTTGTCTCTTCTC | |
| | GGCCAGAAGTAGCTTTGCACTTTTCTAAACTAGAATCCAGAAACT | |
| | TGTTCTTCCAAAGCAGAGAGCATTATGACCAAATATCACCAGGAC | |
| | TGTTACTCAATGTGTGCCGAAAATGACTGAAAGCACTGATATATT | |
| | TAAAAACAAAAGGCAATTTATTAAGGAAATTTGTACCATTTCAGT | |
| | AAACCTGTCTGAATGTACCTGTATACGTTTCAAAAACAccccccc | |
| | cccACTGAATCCCTGTAACCTATTTATTATATAAAGAGTTTGCCT | |
| | TATAAATTTACATAAAAATGTCCGTTTGTGTCTTTTGTTGTAAAA | |
| | ATCAAGTGATTTTTTCATAAGGTTCTTTTAgcatgctggggaGCA | |
| | CGCACGCGGGATATCCTTAAAGACTGTGCATCCGACTCCTACATT | |
| | TATGAAAGTAAATGCCTATTGTTAGAACAAAAAAGGCTACAGAAC | |
| | AAAAAACAAAGCGAAATACCATCTGCTTTAGGTTCAGTGGTATTT | |
| | TCCCGCTGACAGGGAGGCGGGTTTTTGGGTACAGGAAACGAGTCA | |
| | CTATGGAGGCGGTACTATGTAGATGAGAATTCAGGAGCAAACTGG | |
| | GAAAAGCAACTGCTTCCAAATATTTGTGATTTTTACAGTGTAGTT | |
| | TTGGAAAAACTCTTAGCCTACCAATTCTTCTAAGTGTTTTAAAAT | |
| | GTGGGAGCCAGTACACATGAAGTTATAGAGTGTTTTAATGAGGCT | |
| | TAAATATTTACCGTAACTATGAAATGCTACGCATATCATGCTGTT | |
| | CAGGCTCCGTGGCCACGCAACTCAATGATAGGGACTTAGGGTGAA | |
| | AACAAGTATGTAAGTATCACAGAGAACATAATTTTTGGAGcaggt | |
| | tttctgacttcggtcggaaaacccctACTTTCTGGAGTTTCAAAA | |
| | GTAGACTGTACGCTAAGGGTCATATCTTTTTTTGTTTTGGTTTGT | |
| | TCTGAGTCGACCAAGGACACAATCGAGCTCCGATCCGTACTGTCG | |
| | AGAAACTTGTATCCGTAAAGACTGTGCATCCGACTCCTACATTTA | |
| | TGAAAGTAAATGCCTATTGTTAGAACAAAAAAGGCTACAGAACAA | |
| | AAAACAAAGCGAAATACCATCTGCTTTAGGTTCAGTGGTATTTTC | |
| | CCGCTGACAGGGAGGCGGGTTTTTGGGTACAGGAAACGAGTCACT | |
| | ATGGAGGCGGTACTATGTAGATGAGAATTCAGGAGCAAACTGGGA | |
| | AAAGCAACTGCTTCCAAATATTTGTGATTTTTACAGTGTAGTTTT | |
| | GGAAAAACTCTTAGCCTACCAATTCTTCTAAGTGTTTTAAAATGT | |
| | GGGAGCCAGTACACATGAAGTTATAGAGTGTTTTAATGAGGCTTA | |
| | AATATTTACCGTAACTATGAAATGCTACGCATATCATGCTGTTCA | |
| | GGCTCCGTGGCCACGCAACTCAATGATAGGGACTTAGGGTGAAAA | |
| | CAAGTATGTAAGTATCACAGAGAACATAATTTTTGGAGcaggttt | |
| | tctgacttcggtcggaaaacccctACTTTCTGGAGTTTCAAAAGT | |
| | AGACTGTACGCTAAGGGTCATATCTTTTTTTGTTTTGGTTTGTTG | |
| | AGCGTTCCCAGCACTTCAGCCAAGGAAGCTACCAATTTTTAGTTT | |
| | CCGAGTGTCACGTTAAAGACTGTGCATCCGACTCCTACATTTATG | |
| | AAAGTAAATGCCTATTGTTAGAACAAAAAAGGCTACAGAACAAAA | |
| | AACAAAGCGAAATACCATCTGCTTTAGGTTCAGTGGTATTTTCCC | |
| | GCTGACAGGGAGGCGGGTTTTTGGGTACAGGAAACGAGTCACTAT | |
| | GGAGGCGGTACTATGTAGATGAGAATTCAGGAGCAAACTGGGAAA | |
| | AGCAACTGCTTCCAAATATTTGTGATTTTTACAGTGTAGTTTTGG | |
| | AAAAACTCTTAGCCTACCAATTCTTCTAAGTGTTTTAAAATGTGG | |
| | GAGCCAGTACACATGAAGTTATAGAGTGTTTTAATGAGGCTTAAA | |
| | TATTTACCGTAACTATGAAATGCTACGCATATCATGCTGTTCAGG | |
| | CTCCGTGGCCACGCAACTCAATGATAGGGACTTAGGGTGAAAACA | |
| | AGTATGTAAGTATCACAGAGAACATAATTTTTGGAGcaggttttc | |
| | tgacttcggtcggaaaacccctACTTTCTGGAGTTTCAAAAGTAG | |
| | ACTGTACGCTAAGGGTCATATCTTTTTTTGTTTTGGTTTGTACAT | |
| | GGA | |
| HsCandidate-02-2 | ggcctccgcgccgggttttggcgcctcccgcgggcgcccccctcc | 247 |
| | tcacggcgagcgctgccacgtcagacgaagggcgcagcgagcgtc | |
| | ctgatccttccgcccggacgctcaggacagcggcccgctgctcat | |
| | aagactcggccttagaaccccagtatcagcagaaggacattttag | |
| | gacgggacttgggtgactctagggcactggttttctttccagaga | |
| | gcggaacaggcgaggaaaagtagtcccttctcggcgattctgcgg | |
| | agggatctccgtggggcggtgaacgccgatgattatataaggacg | |
| | cgccgggtgtggcacagctagttccgtcgcagccgggatttgggt | |
| | cgcggttcttgtttgtggatcgctgtgatcgtcacttggtCGGTA | |
| | AGTTTAGTCTTTTTGTCTTTTATTTCAGGTCCCGGATCCGGTGGT | |
| | GGTGCAAATCAAAGAACTGCTCCTCAGTGGATGTTGCCTTTACTT | |
| | CTAGGCGCGCGCGCTCCCTCCTCTCGGAGAGAGGGCTGTGGTAAA | |
| | AGCCGTCCGGAAAATGGCCGCCGCCGCCGCCGCCGCGCCGAGCGG | |
| | AGGAGGAGGAGGAGGCGAGGAGGAGAGACTGGAAGAAAAGTCAGA | |
| | AGACCAGGACCTCCAGGGCCTCAAGGACAAACCCCTCAAGTTTAA | |
| | AAAGGTGAAGAAAGATAAGAAAGAAGAGAAAGAGGGCAAGCATGA | |
| | GCCCGTGCAGCCATCAGCCCACCACTCTGCTGAGCCCGCAGAGGC | |
| | AGGCAAAGCAGAGACATCAGAAGGGTCAGGCTCCGCCCCGGCTGT | |
| | GCCGGAAGCTTCTGCCTCCCCCAAACAGCGGCGCTCCATCATCCG | |
| | TGACCGGGGACCCATGTATGATGACCCCACCCTGCCTGAAGGCTG | |
| | GACACGGAAGCTTAAGCAAAGGAAATCTGGCCGCTCTGCTGGGAA | |
| | GTATGATGTGTATTTGATCAATCCCCAGGGAAAAGCCTTTCGCTC | |
| | TAAAGTGGAGTTGATTGCGTACTTCGAAAAGGTAGGCGACACATC | |
| | CCTGGACCCTAATGATTTTGACTTCACGGTAACTGGGAGAGGGAG | |
| | CCCCTCCCGGCGAGAGCAGAAACCACCTAAGAAGCCCAAATCTCC | |
| | CAAAGCTCCAGGAACTGGCAGAGGCCGGGGACGCCCCAAAGGGAG | |
| | CGGCACCACGAGACCCAAGGCGGCCACGTCAGAGGGTGTGCAGGT | |
| | GAAAAGGGTCCTGGAGAAAAGTCCTGGGAAGCTCCTTGTCAAGAT | |
| | GCCTTTTCAAACTTCGCCAGGGGGCAAGGCTGAGGGGGGTGGGGC | |
| | CACCACATCCACCCAGGTCATGGTGATCAAACGCCCCGGCAGGAA | |
| | GCGAAAAGCTGAGGCCGACCCTCAGGCCATTCCCAAGAAACGGGG | |
| | CCGAAAGCCGGGGAGTGTGGTGGCAGCCGCTGCCGCCGAGGCCAA | |
| | AAAGAAAGCCGTGAAGGAGTCTTCTATCCGATCTGTGCAGGAGAC | |
| | CGTACTCCCCATCAAGAAGCGCAAGACCCGGGAGACGGTCAGCAT | |
| | CGAGGTCAAGGAAGTGGTGAAGCCCCTGCTGGTGTCCACCCTCGG | |
| | TGAGAAGAGCGGGAAAGGACTGAAGACCTGTAAGAGCCCTGGGCG | |
| | GAAAAGCAAGGAGAGCAGCCCCAAGGGGCGCAGCAGCAGCGCCTC | |
| | CTCACCCCCCAAGAAGGAGCACCACCACCATCACCACCACTCAGA | |
| | GTCCCCAAAGGCCCCCGTGCCACTGCTCCCACCCCTGCCCCCACC | |
| | TCCACCTGAGCCCGAGAGCTCCGAGGACCCCACCAGCCCCCCTGA | |
| | GCCCCAGGACTTGAGCAGCAGCGTCTGCAAAGAGGAGAAGATGCC | |
| | CAGAGGAGGCTCACTGGAGAGCGACGGCTGCCCCAAGGAGCCAGC | |
| | TAAGACTCAGCCCGCGGTTGCCACCGCCGCCACGGCCGCAGAAAA | |
| | GTACAAACACCGAGGGGAGGGAGAGCGCAAAGACATTGTTTCATC | |
| | CTCCATGCCAAGGCCAAACAGAGAGGAGCCTGTGGACAGCCGGAC | |
| | GCCCGTGACCGAGAGAGTTAGCTGACTTTACACGGAGCGGATTGC | |
| | AAAGCAAACCAACAAGAATAAAGGCAGCTGTTGTCTCTTCTCGGC | |
| | CAGAAGTAGCTTTGCACTTTTCTAAACTAGAATCCAGAAACTTGT | |
| | TCTTCCAAAGCAGAGAGCATTATGACCAAATATCACCAGGACTGT | |
| | TACTCAATGTGTGCCGAAAATGACTGAAAGCACTGATATATTTAA | |
| | AAACAAAAGGCAATTTATTAAGGAAATTTGTACCATTTCAGTAAA | |
| | CCTGTCTGAATGTACCTGTATACGTTTCAAAAACAcccccccccc | |
| | ACTGAATCCCTGTAACCTATTTATTATATAAAGAGTTTGCCTTAT | |
| | AAATTTACATAAAAATGTCCGTTTGTGTCTTTTGTTGTAAAAATC | |
| | AAGTGATTTTTTCATAAGGTTCTTTTAgcatgctggggaGCACGC | |
| | ACGCGGGATATCCTTAAAGACTGTGCATCCGACTCCTACATTTAT | |
| | GAAAGTAAATGCCTATTGTTAGAACAAAAAAGGCTACAGAACAAA | |
| | AAACAAAGCGAAATACCATCTGCTTTAGGTTCAGTGGTATTTTCC | |
| | CGCTGACAGGGAGGCGGGTTTTTGGGTACAGGAAACGAGTCACTA | |
| | TGGAGGCGGTACTATGTAGATGAGAATTCAGGAGCAAACTGGGAA | |
| | AAGCAACTGCTTCCAAATATTTGTGATTTTTACAGTGTAGTTTTG | |
| | GAAAAACTCTTAGCCTACCAATTCTTCTAAGTGTTTTAAAATGTG | |
| | GGAGCCAGTACACATGAAGTTATAGAGTGTTTTAATGAGGCTTAA | |
| | ATATTTACCGTAACTATGAAATGCTACGCATATCATGCTGTTCAG | |
| | GCTCCGTGGCCACGCAACTCATGGGGGGAGGTAGGTAGGTATTTC | |
| | TTCCCTGAAGTGTTAAACAAAATTTTTGGAGcaggttttctgact | |
| | tcggtcggaaaacccctACTTTCTGGAGTTTCAAAAGTAGACTGT | |
| | ACGCTAAGGGTCATATCTTTTTTTGTTTTGGTTTGTTCTGAGTCG | |
| | ACCAAGGACACAATCGAGCTCCGATCCGTACTGTCGAGAAACTTG | |
| | TATCCGTAAAGACTGTGCATCCGACTCCTACATTTATGAAAGTAA | |
| | ATGCCTATTGTTAGAACAAAAAAGGCTACAGAACAAAAAACAAAG | |
| | CGAAATACCATCTGCTTTAGGTTCAGTGGTATTTTCCCGCTGACA | |
| | GGGAGGCGGGTTTTTGGGTACAGGAAACGAGTCACTATGGAGGCG | |
| | GTACTATGTAGATGAGAATTCAGGAGCAAACTGGGAAAAGCAACT | |
| | GCTTCCAAATATTTGTGATTTTTACAGTGTAGTTTTGGAAAAACT | |
| | CTTAGCCTACCAATTCTTCTAAGTGTTTTAAAATGTGGGAGCCAG | |
| | TACACATGAAGTTATAGAGTGTTTTAATGAGGCTTAAATATTTAC | |
| | CGTAACTATGAAATGCTACGCATATCATGCTGTTCAGGCTCCGTG | |
| | GCCACGCAACTCATGGGGGGAGGTAGGTAGGTATTTCTTCCCTGA | |
| | AGTGTTAAACAAAATTTTTGGAGcaggttttctgacttcggtcgg | |
| | aaaacccctACTTTCTGGAGTTTCAAAAGTAGACTGTACGCTAAG | |
| | GGTCATATCTTTTTTTGTTTTGGTTTGTTGAGCGTTCCCAGCACT | |
| | TCAGCCAAGGAAGCTACCAATTTTTAGTTTCCGAGTGTCACGTTA | |
| | AAGACTGTGCATCCGACTCCTACATTTATGAAAGTAAATGCCTAT | |
| | TGTTAGAACAAAAAAGGCTACAGAACAAAAAACAAAGCGAAATAC | |
| | CATCTGCTTTAGGTTCAGTGGTATTTTCCCGCTGACAGGGAGGCG | |
| | GGTTTTTGGGTACAGGAAACGAGTCACTATGGAGGCGGTACTATG | |
| | TAGATGAGAATTCAGGAGCAAACTGGGAAAAGCAACTGCTTCCAA | |
| | ATATTTGTGATTTTTACAGTGTAGTTTTGGAAAAACTCTTAGCCT | |
| | ACCAATTCTTCTAAGTGTTTTAAAATGTGGGAGCCAGTACACATG | |
| | AAGTTATAGAGTGTTTTAATGAGGCTTAAATATTTACCGTAACTA | |
| | TGAAATGCTACGCATATCATGCTGTTCAGGCTCCGTGGCCACGCA | |
| | ACTCATGGGGGGAGGTAGGTAGGTATTTCTTCCCTGAAGTGTTAA | |
| | ACAAAATTTTTGGAGcaggttttctgacttcggtcggaaaacccc | |
| | tACTTTCTGGAGTTTCAAAAGTAGACTGTACGCTAAGGGTCATAT | |
| | CTTTTTTTGTTTTGGTTTGTACATGGA | |
| HsMECP2 CDS | ATGGCCGCCGCCGCCGCCGCCGCGCCGAGCGGAGGAGGAGGAGGA | 248 |
| | GGCGAGGAGGAGAGACTGGAAGAAAAGTCAGAAGACCAGGACCTC | |
| | CAGGGCCTCAAGGACAAACCCCTCAAGTTTAAAAAGGTGAAGAAA | |
| | GATAAGAAAGAAGAGAAAGAGGGCAAGCATGAGCCCGTGCAGCCA | |
| | TCAGCCCACCACTCTGCTGAGCCCGCAGAGGCAGGCAAAGCAGAG | |
| | ACATCAGAAGGGTCAGGCTCCGCCCCGGCTGTGCCGGAAGCTTCT | |
| | GCCTCCCCCAAACAGCGGCGCTCCATCATCCGTGACCGGGGACCC | |
| | ATGTATGATGACCCCACCCTGCCTGAAGGCTGGACACGGAAGCTT | |
| | AAGCAAAGGAAATCTGGCCGCTCTGCTGGGAAGTATGATGTGTAT | |
| | TTGATCAATCCCCAGGGAAAAGCCTTTCGCTCTAAAGTGGAGTTG | |
| | ATTGCGTACTTCGAAAAGGTAGGCGACACATCCCTGGACCCTAAT | |
| | GATTTTGACTTCACGGTAACTGGGAGAGGGAGCCCCTCCCGGCGA | |
| | GAGCAGAAACCACCTAAGAAGCCCAAATCTCCCAAAGCTCCAGGA | |
| | ACTGGCAGAGGCCGGGGACGCCCCAAAGGGAGCGGCACCACGAGA | |
| | CCCAAGGCGGCCACGTCAGAGGGTGTGCAGGTGAAAAGGGTCCTG | |
| | GAGAAAAGTCCTGGGAAGCTCCTTGTCAAGATGCCTTTTCAAACT | |
| | TCGCCAGGGGGCAAGGCTGAGGGGGGTGGGGCCACCACATCCACC | |
| | CAGGTCATGGTGATCAAACGCCCCGGCAGGAAGCGAAAAGCTGAG | |
| | GCCGACCCTCAGGCCATTCCCAAGAAACGGGGCCGAAAGCCGGGG | |
| | AGTGTGGTGGCAGCCGCTGCCGCCGAGGCCAAAAAGAAAGCCGTG | |
| | AAGGAGTCTTCTATCCGATCTGTGCAGGAGACCGTACTCCCCATC | |
| | AAGAAGCGCAAGACCCGGGAGACGGTCAGCATCGAGGTCAAGGAA | |
| | GTGGTGAAGCCCCTGCTGGTGTCCACCCTCGGTGAGAAGAGCGGG | |
| | AAAGGACTGAAGACCTGTAAGAGCCCTGGGCGGAAAAGCAAGGAG | |
| | AGCAGCCCCAAGGGGCGCAGCAGCAGCGCCTCCTCACCCCCCAAG | |
| | AAGGAGCACCACCACCATCACCACCACTCAGAGTCCCCAAAGGCC | |
| | CCCGTGCCACTGCTCCCACCCCTGCCCCCACCTCCACCTGAGCCC | |
| | GAGAGCTCCGAGGACCCCACCAGCCCCCCTGAGCCCCAGGACTTG | |
| | AGCAGCAGCGTCTGCAAAGAGGAGAAGATGCCCAGAGGAGGCTCA | |
| | CTGGAGAGCGACGGCTGCCCCAAGGAGCCAGCTAAGACTCAGCCC | |
| | GCGGTTGCCACCGCCGCCACGGCCGCAGAAAAGTACAAACACCGA | |
| | GGGGAGGGAGAGCGCAAAGACATTGTTTCATCCTCCATGCCAAGG | |
| | CCAAACAGAGAGGAGCCTGTGGACAGCCGGACGCCCGTGACCGAG | |
| | AGAGTTAGCTGA | |
| HsU1-1 Terminator | ACTTTCTGGAGTTTCAAAAGTAGACTGTACGCTAAGGGTCATATC | 249 |
| | TTTTTTTGTTTTGGTTTGT | |

TABLE 6
Sequences of exonic splicing silencers and antisense sequences components and quantitative
assessment of Mecp2 splicing of the expressing system provided herein.

| | | SEQ | | Relative | SEQ |
|---|---|---|---|---|---|
| | | ID | | Normalized | ID |
| ID | ESS | NO. | Antisense | Luciferase | NO. |
| Scram-01 | ATGATAGGGACTTAGGG | 240 | GCACCCCATCCCCCACT | 1.029023586 | 250 |
| | TGA | | ACA | | |
| Scram-02 | TGGGGGGAGGTAGGTA | 242 | GGGATCGAATCAGAGTC | 0.973409073 | 251 |
| | GGTA | | ATGCGGAGGTGTA | | |
| Scram-03 | ATGATAGGGACTTAGGG | 240 | GACAGTGCTCTAGGATT | 0.997567341 | 252 |
| | TGA | | ATTCTGGTAGTTA | | |
| HsM2-e13- | ATGATAGGGACTTAGGG | 240 | CGGCGGTCCCACTCACA | 0.427931941 | 253 |
| 24-01 | TGA | | Gtctctc | | |
| HsM2-e13- | ATGATAGGGACTTAGGG | 240 | ccgcccgcGGCCACGGCGG | 0.429327383 | 254 |
| 24-02 | TGA | | TCCCA | | |
| HsM2-e13- | ATGATAGGGACTTAGGG | 240 | ccggcaagggtccccgcccgcGGC | 0.377507942 | 255 |
| 24-03 | TGA | | | | |
| HsM2-e13- | ATGATAGGGACTTAGGG | 240 | cGGCCACGGCGGTCCCA | 0.456879411 | 256 |
| 30-01 | TGA | | CTCACAGtctctc | | |
| HsM2-e13- | ATGATAGGGACTTAGGG | 240 | tccccgcccgcGGCCACGGCG | 0.259898929 | 257 |
| 30-02 | TGA | | GTCCCACTC | | |
| HsM2-e13- | ATGATAGGGACTTAGGG | 240 | ccggcaagggtccccgcccgcGGC | 0.732517806 | 258 |
| 30-03 | TGA | | CACGGC | | |
| HsM2-e13- | TGGGGGGAGGTAGGTA | 242 | CGGCGGTCCCACTCACA | 0.359760782 | 259 |
| E2-24-01 | GGTA | | Gtctctc | | |
| HsM2-e13- | TGGGGGGAGGTAGGTA | 242 | ccgcccgcGGCCACGGCGG | 0.196511306 | 260 |
| E2-24-02 | GGTA | | TCCCA | | |
| HsM2-e13- | TGGGGGGAGGTAGGTA | 242 | ccggcaagggtccccgcccgcGGC | 0.294398179 | 261 |
| E2-24-03 | GGTA | | | | |
| HsM2-e13- | TGGGGGGAGGTAGGTA | 242 | cGGCCACGGCGGTCCCA | 0.23882839 | 262 |
| E2-30-01 | GGTA | | CTCACAGtctctc | | |
| HsM2-e13- | TGGGGGGAGGTAGGTA | 242 | tccccgcccgcGGCCACGGCG | 0.581988791 | 263 |
| E2-30-02 | GGTA | | GTCCCACTC | | |
| HsM2-e13- | TGGGGGGAGGTAGGTA | 242 | ccggcaagggtccccgcccgcGGC | 0.887371433 | 264 |
| E2-30-03 | GGTA | | CACGGC | | |
| HsM2-e35- | ATGATAGGGACTTAGGG | 240 | AAGTGAGCAGAGGCAG | 0.741326829 | 265 |
| 24-01 | TGA | | GCTTGGAC | | |
| HsM2-e35- | ATGATAGGGACTTAGGG | 240 | GAACATGCCAGTCTGCA | 0.831586669 | 266 |
| 24-02 | TGA | | GAACAAG | | |
| HsM2-e35- | ATGATAGGGACTTAGGG | 240 | CAAGTATGTAAGTATCA | 0.595553327 | 267 |
| 24-03 | TGA | | CAGAGAA | | |
| HsM2-e35- | ATGATAGGGACTTAGGG | 240 | TTTCTTCCCTGAAGTGTT | 0.772106398 | 268 |
| 24-04 | TGA | | AAACAA | | |
| HsM2-e35- | ATGATAGGGACTTAGGG | 240 | AGAACAAGTGAGCAGA | 0.721370045 | 269 |
| 30-01 | TGA | | GGCAGGCTTGGACC | | |
| HsM2-e35- | ATGATAGGGACTTAGGG | 240 | CAGAGAACATGCCAGTC | 0.436592681 | 270 |
| 30-02 | TGA | | TGCAGAACAAGTG | | |
| HsM2-e35- | ATGATAGGGACTTAGGG | 240 | AAACAAGTATGTAAGTA | 0.2188879 | 271 |
| 30-03 | TGA | | TCACAGAGAACAT | | |
| HsM2-e35- | ATGATAGGGACTTAGGG | 240 | CTTTTCTTCCCTGAAGTG | 0.434246075 | 272 |
| 30-04 | TGA | | TTAAACAAGTAT | | |
| HsM2-e35- | TGGGGGGAGGTAGGTA | 242 | AAGTGAGCAGAGGCAG | 0.643692322 | 273 |
| E2-24-01 | GGTA | | GCTTGGAC | | |
| HsM2-e35- | TGGGGGGAGGTAGGTA | 242 | GAACATGCCAGTCTGCA | 0.607110712 | 274 |
| E2-24-02 | GGTA | | GAACAAG | | |
| HsM2-e35- | TGGGGGGAGGTAGGTA | 242 | CAAGTATGTAAGTATCA | 0.562209476 | 275 |
| E2-24-03 | GGTA | | CAGAGAA | | |
| HsM2-e35- | TGGGGGGAGGTAGGTA | 242 | TTTCTTCCCTGAAGTGTT | 0.317275799 | 276 |
| E2-24-04 | GGTA | | AAACAA | | |
| HsM2-e35- | TGGGGGGAGGTAGGTA | 242 | AGAACAAGTGAGCAGA | 1.315210216 | 277 |
| E2-30-01 | GGTA | | GGCAGGCTTGGACC | | |
| HsM2-e35- | TGGGGGGAGGTAGGTA | 242 | CAGAGAACATGCCAGTC | 1.333693861 | 278 |
| E2-30-02 | GGTA | | TGCAGAACAAGTG | | |
| HsM2-e35- | TGGGGGGAGGTAGGTA | 242 | AAACAAGTATGTAAGTA | 0.423330542 | 279 |
| E2-30-03 | GGTA | | TCACAGAGAACAT | | |
| HsM2-e35- | TGGGGGGAGGTAGGTA | 242 | CTTTTCTTCCCTGAAGTG | 0.285016635 | 280 |
| E2-30-04 | GGTA | | TTAAACAAGTAT | | |

TABLE 7
Sequences of exonic splicing silencers and antisense sequences components and quantitative
assessment of Mecp2 splicing of the expressing system provided herein.

| | | SEQ | | Relative | SEQ |
|---|---|---|---|---|---|
| | | ID | | Normalized | ID |
| ID | ESS | NO: | Antisense | Luciferase | NO: |
| Scram-01 | ATGATAGGGACTTAGGG | 240 | GCACCCCATCCCCCACT | 0.892754966 | 281 |
| | TGA | | ACA | | |
| Scram-02 | TGGGGGGAGGTAGGTA | 242 | GGGATCGAATCAGAGTC | 0.996521948 | 282 |
| | GGTA | | ATGCGGAGGTGTA | | |
| Scram-03 | ATGATAGGGACTTAGGG | 240 | GACAGTGCTCTAGGATT | 1.110723085 | 283 |
| | TGA | | ATTCTGGTAGTTA | | |
| HsM2-e33- | ATGATAGGGACTTAGGG | 240 | AGTTGCTCTTACTTACTT | 0.675321951 | 284 |
| 24-01 | TGA | | GATCAA | | |
| HsM2-e33- | ATGATAGGGACTTAGGG | 240 | TCCCTGCCCTGTAGAGA | 0.74024895 | 285 |
| 24-02 | TGA | | TAGGAGT | | |
| HsM2-e33- | ATGATAGGGACTTAGGG | 240 | GAGGGATCCTTGTCCCT | 0.708705245 | 286 |
| 24-03 | TGA | | GCCCTCC | | |
| HsM2-e33- | ATGATAGGGACTTAGGG | 240 | ACATACATTTTCCTGCT | 0.762571758 | 287 |
| 24-04 | TGA | | CCATGAG | | |
| HsM2-e33- | ATGATAGGGACTTAGGG | 240 | TAGGAGTTGCTCTTACT | 0.556829995 | 288 |
| 30-01 | TGA | | TACTTGATCAAAT | | |
| HsM2-e33- | ATGATAGGGACTTAGGG | 240 | CCCTCCCTGCCCTGTAG | 0.74488039 | 289 |
| 30-02 | TGA | | AGATAGGAGTTGC | | |
| HsM2-e33- | ATGATAGGGACTTAGGG | 240 | ATGAGGGATCCTTGTCC | 1.243665222 | 290 |
| 30-03 | TGA | | CTGCCCTCCCTGC | | |
| HsM2-e33- | ATGATAGGGACTTAGGG | 240 | CACATACATTTTCCTGC | 0.765416272 | 291 |
| 30-04 | TGA | | TCCATGAGGGATC | | |
| HsM2-e45- | ATGATAGGGACTTAGGG | 240 | TGGTGGTGACAACGCTC | 0.504345012 | 292 |
| 24-01 | TGA | | TGACAAA | | |
| HsM2-e45- | ATGATAGGGACTTAGGG | 240 | TCAGAGATAGGGCAGA | 0.75525366 | 293 |
| 24-02 | TGA | | GCGGATGG | | |
| HsM2-e45- | ATGATAGGGACTTAGGG | 240 | TAGAGGCTCTCCATAGC | 0.732920737 | 294 |
| 24-03 | TGA | | AATGTCA | | |
| HsM2-e45- | ATGATAGGGACTTAGGG | 240 | CAGAAAGACACAAGGA | 0.455379762 | 295 |
| 24-04 | TGA | | ACAATTAG | | |
| HsM2-e45- | ATGATAGGGACTTAGGG | 240 | CCTGGGGACTGTGGGGA | 0.728080583 | 296 |
| 24-05 | TGA | | CAAACAG | | |
| HsM2-e45- | ATGATAGGGACTTAGGG | 240 | CAATGTCAGAGATAGGG | 0.849347861 | 297 |
| 30-01 | TGA | | CAGAGCGGATGGT | | |
| HsM2-e45- | ATGATAGGGACTTAGGG | 240 | CAATTAGAGGCTCTCCA | 0.869424079 | 298 |
| 30-02 | TGA | | TAGCAATGTCAGA | | |
| HsM2-e45- | ATGATAGGGACTTAGGG | 240 | AAACAGAAAGACACAA | 0.590523269 | 299 |
| 30-03 | TGA | | GGAACAATTAGAGG | | |
| HsM2-e45- | ATGATAGGGACTTAGGG | 240 | TCCCTGGGGACTGTGGG | 0.613800776 | 300 |
| 30-04 | TGA | | GACAAACAGAAAG | | |
| HsM2-e33- | TGGGGGGAGGTAGGTA | 242 | AGTTGCTCTTACTTACTT | 0.938237731 | 301 |
| E2-24-01 | GGTA | | GATCAA | | |
| HsM2-e33- | TGGGGGGAGGTAGGTA | 242 | TCCCTGCCCTGTAGAGA | 0.578434006 | 302 |
| E2-24-02 | GGTA | | TAGGAGT | | |
| HsM2-e33- | TGGGGGGAGGTAGGTA | 242 | GAGGGATCCTTGTCCCT | 0.939000079 | 303 |
| E2-24-03 | GGTA | | GCCCTCC | | |
| HsM2-e33- | TGGGGGGAGGTAGGTA | 242 | ACATACATTTTCCTGCT | 0.861738519 | 304 |
| E2-24-04 | GGTA | | CCATGAG | | |
| HsM2-e33- | TGGGGGGAGGTAGGTA | 242 | TAGGAGTTGCTCTTACT | 0.800587966 | 305 |
| E2-30-01 | GGTA | | TACTTGATCAAAT | | |
| HsM2-e33- | TGGGGGGAGGTAGGTA | 242 | CCCTCCCTGCCCTGTAG | 0.60121923 | 306 |
| E2-30-02 | GGTA | | AGATAGGAGTTGC | | |
| HsM2-e33- | TGGGGGGAGGTAGGTA | 242 | ATGAGGGATCCTTGTCC | 0.836164721 | 307 |
| E2-30-03 | GGTA | | CTGCCCTCCCTGC | | |
| HsM2-e33- | TGGGGGGAGGTAGGTA | 242 | CACATACATTTTCCTGC | 0.988427358 | 308 |
| E2-30-04 | GGTA | | TCCATGAGGGATC | | |
| HsM2-e45- | TGGGGGGAGGTAGGTA | 242 | TGGTGGTGACAACGCTC | 0.868080282 | 309 |
| E2-24-01 | GGTA | | TGACAAA | | |
| HsM2-e45- | TGGGGGGAGGTAGGTA | 242 | TCAGAGATAGGGCAGA | 0.839606614 | 310 |
| E2-24-02 | GGTA | | GCGGATGG | | |
| HsM2-e45- | TGGGGGGAGGTAGGTA | 242 | TAGAGGCTCTCCATAGC | 0.800816658 | 311 |
| E2-24-03 | GGTA | | AATGTCA | | |
| HsM2-e45- | TGGGGGGAGGTAGGTA | 242 | CAGAAAGACACAAGGA | 0.783169354 | 312 |
| E2-24-04 | GGTA | | ACAATTAG | | |
| HsM2-e45- | TGGGGGGAGGTAGGTA | 242 | CCTGGGGACTGTGGGGA | 0.951355203 | 313 |
| E2-24-05 | GGTA | | CAAACAG | | |
| HsM2-e45- | TGGGGGGAGGTAGGTA | 242 | CAATGTCAGAGATAGGG | 0.784817915 | 314 |
| E2-30-01 | GGTA | | CAGAGCGGATGGT | | |
| HsM2-e45- | TGGGGGGAGGTAGGTA | 242 | CAATTAGAGGCTCTCCA | 0.951770201 | 315 |
| E2-30-02 | GGTA | | TAGCAATGTCAGA | | |
| HsM2-e45- | TGGGGGGAGGTAGGTA | 242 | AAACAGAAAGACACAA | 1.150321876 | 316 |
| E2-30-03 | GGTA | | GGAACAATTAGAGG | | |
| HsM2-e45- | TGGGGGGAGGTAGGTA | 242 | TCCCTGGGGACTGTGGG | 1.06876008 | 317 |
| E2-30-04 | GGTA | | GACAAACAGAAAG | | |

TABLE 8
Example Regulatory Elements

| Sequence | | SEQ ID |
|---|---|---|
| Name | Sequence | NO: |
| Mm U7 | aacaacataggagctgtgattggctgttttcagccaatcagcactgactc | 19 |
| Promoter | atttgcatagcctttacaagcggtcacaaactcaagaaacgagcggtttt | |
| | aatagtcttttagaatattgtttatcgaaccgaataaggaactgtgcttt | |
| | gtgattcacatatcagtggaggggtgtggaaatggcaccttgatctcacc | |
| | ctcatcgaaagtggagttgatgtccttccctggctcgctacagacgcact | |
| | tccgc | |
| Mm U1a1 | TAAAGACTGTGCATCCGACTCCTACATTTATGAAAGTAAATGCCTATTGT | 20 |
| (a.k.a. mu1a1) | TAGAACAAAAAAGGCTACAGAACAAAAAACAAAGCGAAATACCATCTGCT | |
| Promoter | TTAGGTTCAGTGGTATTTTCCCGCTGACAGGGAGGCGGGTTTTTGGGTAC | |
| | AGGAAACGAGTCACTATGGAGGCGGTACTATGTAGATGAGAATTCAGGAG | |
| | CAAACTGGGAAAAGCAACTGCTTCCAAATATTTGTGATTTTTACAGTGTA | |
| | GTTTTGGAAAAACTCTTAGCCTACCAATTCTTCTAAGTGTTTTAAAATGT | |
| | GGGAGCCAGTACACATGAAGTTATAGAGTGTTTTAATGAGGCTTAAATAT | |
| | TTACCGTAACTATGAAATGCTACGCATATCATGCTGTTCAGGCTCCGTGG | |
| | CCACGCAACTC | |
| Hs U1-1 | aacaacataggagctgtgattggctgttttcagccaatcagcactgactc | 21 |
| Promoter | AGGGCGACTTCTATGTAGATGAGGCAGCGCAGAGGCTGCTgcctttacaa | |
| | gcggtcacaaactcaagaaacgagcggttttaatagtcttttagaatatt | |
| | gtttatcgaaccgaataaggaactgtgctttgtgattcacatatcagtgg | |
| | aggggtgtggaaatggcaccttgatGGGAGTGCGCGAGGCAAGTGACCGT | |
| | GTGTGgagttgatgtccttccctggctcgctacagacgcacttccgc | |
| Modified Mm | aacaacataggagctgtgattggctgttttcagccaatcagcactgactc | 22 |
| U7 Promoter | AGGGCGACTTCTATGTAGATGAGGCAGCGCAGAGGCTGCTgcctttacaa | |
| | gcggtcacaaactcaagaaacgagcggttttaatagtcttttagaatatt | |
| | gtttatcgaaccgaataaggaactgtgctttgtgattcacatatcagtgg | |
| | aggggtgtggaaatggcaccttgatTTACCGTAACTATGAAATGgagttg | |
| | atgtccttccctggctcgctacagacgcacttccgc | |
| hRNU1-1- | TTTCTTTTGTAATCCGAAACATTCTAGTCTGCGAATTAAAAGCCATTATT | 318 |
| Promoter | TGAAGAAGGATGCCCCGGCTCCATCTGGCCACCGAAAGATTGCTCCTTAA | |
| | CACAGGCTAAGGACCAGCTTCTTTGGGAGAGAACAGACGCAGGGGGGGGA | |
| | GGGAAAAAGGGAGAGGCAGACGTCACTTCCTCTTGGCGACTCTGGCAGCA | |
| | GATTGGTCGGTTGAGTGGCAGAAAGGCAGACGGGGACTGGGCAAGGCACT | |
| | GTCGGTGACATCACGGACAGGGCGACTTCTATGTAGATGAGGCAGCGCAG | |
| | AGGCTGCTGCTTCGCCACTTGCTGCTTCGCCACGAAGGGAGTTCCCGTGC | |
| | CCTGGGAGCGGGTTCAGGACCGCTGATCGGAAGTGAGAATCCCAGCTGTG | |
| | TGTCAGGGCTGGAAAGGGCTCGGGAGTGCGCGGGGCAAGTGACCGTGTGT | |
| | GTAAAGAGTGAGGCGTATGAGGCTGTGTCGGGGCAGAGGCACAACGTTTC | |
| hRNU1-2- | GTTTCTTCTGTAATCCGAAACATTCTAGTCTGCGAATTAAAAGCCATTAT | 319 |
| Promoter | TTGAAGAAGGATGCCCCGGCTCCATCTGGCCACCGAAAGGTTGCTCCTTA | |
| | ACACAGGCTAAGGACCAGCTTTTTTGGGAGAGAACAGACGCAGGGGGGGG | |
| | AGGGAAAAAGGGAGAGGCAGACGTCACTTCCTCTTGGCGGCTCTGGCAGC | |
| | AGATTGGTCAGTTGAGTGGCAGAAAAGCAGACGGGGACTGGGCAAGGCAC | |
| | TGTCGGTGACATCACGGACAGGGCGACTTCTATGTAGATGAGGCAGCGCA | |
| | GAGGCTGCTGCTTCGCCACTTGCTGCTTCGCCACGAAGGAGTTCCCCTGC | |
| | CCTGGGAGCGGGTTCAGGACCGCGGATCGGAAGAGAGAATCCCAGCTGTG | |
| | TGTCAGGGCTGGAAAGGGCTCGGGAGTGCGCGGGGCAAGTGACCGTGTGT | |
| | GTAAAGAGTGAGGCGTATGAGGCTGTGTCGGGGCAGAGCCCGAAGATCTC | |
| hRNU1-3- | GTTTCTTTTGTAATCCGAAACATTCTAGTCTGCGAATTAAAAGCCATTAT | 320 |
| Promoter | TTGAAGAAGGATGCCCCGGCTCCATCTGGCCACCGAAAGGTTGCTCCTTA | |
| | ACACAGGCTAAGGACCAGCTTCTTTGGGAGAGAACAGACGCAGGGGGGGG | |
| | AGGGAAAAAGGGAGAGGCAGACGTCACTTCCCCTTGGCGGCTCTGGCAGC | |
| | AGATTGGTCGGTTGAGTGGCAGAAAGGCAGACGGGGACTGGGCAAGGCAC | |
| | TGTCGGTGACATCACGGACAGGGCGACTTCTATGTAGATGAGGCAGCGCA | |
| | GAGGCTGCTGCTTCGCCACTTGCTGCTTCGCCACGAAGGAGTTCCCGTGC | |
| | CCTGGGAGCGGGTTCAGGACCGCGGATCGGAAGTGAGAATCCCAGCTGTG | |
| | TGTCAGGGCTGGAAAGGGCTCGGGAGTGCGCGGGGCAAGTGACCGTGTGT | |
| | GTAAAGAGTGAGGCGTATGAGGCTGTGTCGGGGCAGAGCCCGAAGATCTC | |
| hRNU2-1- | TCTCCCCGCCCGCGGGCGGCGAAGTAAAGGCCCAGCGCAGCCCGCGCTCC | 321 |
| Promoter | TGCCCTGGAGCCTCGTCTTTCTCCAGGAAAACGTGGACCGCTCTCCGCCG | |
| | ACAGGTCTCTTCCACAGACCCCTGTCGCCTTCGCCCCCGGTCTCTTCCGG | |
| | TTCTGTCTTTTCGCTGGCTCGATACGAACAAGGAAGTCGCCCCCAGCGGA | |
| | GCCCCGGCTCCCCCAGGCAGAGGCGGCCCCGGGGGCGGAGTCAACGGCGG | |
| | AGGCCACGCCCTCTGTGAAAGGGCGGGGCATGCAAATTCGAAATGAAAGC | |
| | CCGGGAACGCCGGAAGAAGCACGGGTGTAAGATTTCCCTTTTCAAAGGCA | |
| | GAGAATAAGAAATCAGCCCGAGAGTGTAAGGGCGTCAATAGCGCTGTGGA | |
| | CGAGACAGAGGGAATGGGGCAAGGAGCGAGGCTGGGGCTCTCACCGCGAC | |
| | TTGAATGTGGATGAGAGTGGGACGGTGACGGCGGGCGCGAAGGCGAGCGC | |
| hU3- | CCAACAAGAGAGACCCTCATCTCTACAAAATATTTTTTAAAATAACTGGG | 322 |
| Promoter | CCTCATGGTGCATTCCTGTAATCTGAGCTAGTTGGGAGGATAGCTAGAGC | |
| | CCAGGAGATCGAGGCTGCAGAGAACCGTGATCACACGACTGCACTCCAGC | |
| | CTGGGTGACAGAGCAAGACCCTGTCTCAATAGATAGATAGATAGATAGAT | |
| | AGATAGATAGATAGATAGATAGATAGATAAAAACAGAGAGGTGAAAAATA | |
| | TGGTTTTAAGGGTTCTGTTTAAGAATACTCTGTTCCAACATGGAGTTTGT | |
| | CAACTCTAAAGTGGTAAAAAACAAGACAGATTGTAGACATTTTCATAAAA | |
| | GGCAGGATTATTTGGTGTCACCAAATTAAATATGTTAATGGTCACAGCGG | |
| | AGGCCGACTCAATCAGCCTTTTATTCTGCCAGGCTATTTGATACTGCTGA | |
| | GGGCTTACCTATTTCCTGAGGAGAAAAATAGTCATTAAAATGACCTTATA | |
| hRNU4-1- | GGGCATGAAAGATAAAGTTCTGGAGGTAAGTAGTGATGATGGTTACACAA | 323 |
| Promoter | CAATGTGAACATATTCTATGCCAGTGAATTTACACTTAAGGTTAAAATGG | |
| | TAAATTTTATGTATACTTTGGCATAATTTAAAAAAAAGTTTGAAAAAGAA | |
| | AAAAGACAAAACAATAATCGTCTTTGGAGAAGTCTGTTACACTGAATCTG | |
| | GAGCCAAGTGAACAGAACCCTGATTTTGATCCCTTTTCTCTCAAAAGCCC | |
| | TTCGCAGTCTCTGAATTAAGTCTATTAGCATGTTCCTCCCATAGTGCTTT | |
| | GCTTCATATCAACAAAAACCTAGCTAAGTGAAATCAGCAACGATATGCAG | |
| | AAACCACCTACGCAGGTCACAAACATCTTTCTATGATTGTATAATTTTCA | |
| | AGCAAGCAATAAGTGAAGATTTTTCCATAGGCCCTAAACTCACCTTTGCG | |
| | AAATAGGAAGCTGGTTTATTGGGAGTGATGAGCAGGGGGCGTAACAAATT | |
| hRNU5A-1- | GAGACAGGGCTTAAAAGTCCTGGGCAATTAGCTGGGCACAGTGTCGTGCG | 324 |
| Promoter | CCTGTAATCCCACCTAGTTGGGAGGCTGAGGCAGAAGAATCTCTTGAACC | |
| | CGAGGTAGAGGTTGCAGTGAGCCGAGATCGCGCCACTGCACTCCAGCCTG | |
| | GATGACAGAGTGAGACCCTGTCTCAAAAAAAAAAAAAGTCCTGGGCAGCA | |
| | AGGCCTCCACTTCACCCCCTAAAGGTTGCCCCAAGAGCACCGTGTGACTG | |
| | CTAAGGTATTTCCGGAGTCTAAAGACGATTATTCAGGTCTCATTTGCATA | |
| | CCCATAATACACTGCAAACAGTATTTTTTTCGGAAAAACATTTATATATT | |
| | GCTTGACATTTTTAAGTATGAGAATTTTGCATGCAGAATTTTTTTGTATA | |
| | AACTTTCTCAGGTAGTAACCCTTGGGATTAGTAGACACCATCAGTGTACT | |
| | AGGAATTGCAGTTACCCGAAAATTGAGTTACAGAAGTAACTGGT | |
| hRNU6-1- | CGACTCGCAACCTTTTCGGGGTCCCGAGTCCAACACCCGTGGGAATCCCA | 325 |
| Promoter | TGGGCACCATGGCCCCTCGCTCCAAAAATGCTTTCGCGTCGCGCAGACAC | |
| | TGCTCGGTAGTTTCGGGGATCAGCGTTTGAGTAAGAGCCCGCGTCTGAAC | |
| | CCTCCGCGCCGCCCCGGCCCCAGTGGAAAGACGCGCAGGCAAAACGCACC | |
| | ACGTGACGGAGCGTGACCGCGCGCCGAGCGCGCGCCAAGGTCGGGCAGGA | |
| | AGAGGGCCTATTTCCCATGATTCCTTCATATTTGCATATACGATACAAGG | |
| | CTGTTAGAGAGATAATTAGAATTAATTTGACTGTAAACACAAAGATATTA | |
| | GTACAAAATACGTGACGTAGAAAGTAATAATTTCTTGGGTAGTTTGCAGT | |
| | TTTAAAATTATGTTTTAAAATGGACTATCATATGCTTACCGTAACTTGAA | |
| | AGTATTTCGATTTCTTGGCTTTATATATCTTGTGGAAAGGACGAAACACC | |
| RNU7-1- | CAAAGCCGGTTATGAAGCGGGGGGGGGTGGGCTAGTTTTAATAGGTCCAG | 326 |
| Promoter | GCGATTAGTACCTGGCATCCTTAACCACCTACAGTTTGAGAAGGGAGTGG | |
| | GTGATAAAAGCCTGGAAGGGAAGGGAAATCGGGCCGGGCATTAGGCTCCA | |
| | TCGCTCATCAATAGACAAGGCCTTTAGGAAACTGCGACAACGGCTTTTGC | |
| | TCTGGGCCTTTACTGCCGAATCCAGGTCTCCGGGCTTAACAACAACGAAG | |
| | GGGCTGTGACTGGCTGCTTTCTCAACCAATCAGCACCGAACTCATTTGCA | |
| | TGGGCTGAGAACAAATGTTCGCGAACTCTAGAAATGAATGACTTAAGTAA | |
| | GTTCCTTAGAATATTATTTTTCCTACTGAAAGTTACCACATGCGTCGTTG | |
| | TTTATACAGTAATAGGAACAAGAAAAAAGTCACCTAAGCTCACCCTCATC | |
| | AATTGTGGAGTTCCTTTATATCCCATCTTCTCTCCAAACACATACGCAG | |
| hRNU11- | CACGCCTGCCTGGGCTGCTCCAAGGTGGTGGCTAGGGGTGGCACAAGTTA | 327 |
| Promoter | CACATTTTCAATTTGGATAGGTTGTGATTCTTGTCTTCCCCAGTCAGATA | |
| | CCTACAGCCGCTGAGAGCCGGTATTCCAACGCCATGAGACGCCTTCTGTC | |
| | GTGAGCAGTTGACAAGAAAGACCCAGCACTTACTGCAACCGGAAGGAGCG | |
| | GTTCCTCCCTCGCTCGCGCAGCCGCTCTTCCCCGCCACTCCCTCGGTGCC | |
| | CGCCAGCACATTCCCAGCAAGCCCTGAGTATATTTGCATATCAACTCACT | |
| | ACATTTTTTTCTTCTAACTAAAAAATCGAAAGGACAAATTCCAGATTCTC | |
| | CTTGTGAAGTCTTCCTTTCAGTTCAGAAGAAATGGAATTCGCTCTTCAAC | |
| | TTCAGGAAGTTGAAATAAAGAGTTGCTTGGATTTTGTGTTCACCTTTACC | |
| | AAAAAATGGATTTGGTAACACTGCCACCCTGCTTTGGTGACAGAGAAAGC | |
| hRNU12- | TCGAGCTCCACTAGGCCGAGGACCCTAAACCCCGAAGAAAGGAAAGGCCT | 328 |
| Promoter | CTCACCGTCCTTTCGCCGCCGCCCCGCGCTTCCTGATGAGTTCGTCCAGG | |
| | GAGATGTCCGCCATCTTGCTCCGCCGAGCAAGCCGAAAGCAGTCGAGACC | |
| | CCGCGAGCCCGCCCCTTCGGCCGCTAGGGAGCGACGAACTACTTCCGGCG | |
| | TCCGCGGACCAACTCTCGCGACAGCCAGCTCAAAGCAGGCAAGAACCGGA | |
| | AGGGGGGGGACGTTCCCCGTGAGCCTTCGCGGTGCTGGCTGCTCATCTGC | |
| | ATACGGAAGTTCGGCACATTATGAATTATTTATTTTCCTCGAGGGAAAAA | |
| | ATTAAATGAAAAGCAACAAAATACATTATTAACAAGTGAGACAAACTTCA | |
| | ATGGAACTGGATCATGACCTCAACAGTCAACTACGATAGTCATCATACGC | |
| | CTAATGAGAATAGAATTCATTACCTAGGAAATAAACTAAAAACGTCCTT | |
| hRN7SK- | GACAAGAGAAGGACTGAACTGGGGGAGTGAGGGAAGAATGCGAGAGTGAG | 329 |
| Promoter | ACTCAGAGAGTAAAGGGGAGGGAAAAAAAAGAAGAGAGAAAGGGCGAGGA | |
| | AGGGGGCGACCGCAGGAGGGAGACAGACCTGGAGTCCACTCGGAGGCCTG | |
| | GAGCCGCACAAAGCGCCAGGTCAGCGGTCCCGGCTGGGTGAGACCAGCAG | |
| | GCGGCTCTAGCGCGCGGGAGCTGGGCGAGGCTCCGGGACGACCTCACCAA | |
| | TGGAGACTGCAGTATTTAGCATGCCCCACCCATCTGCAAGGCATTCTGGA | |
| | TAGTGTCAAAACAGCCGGAAATCAAGTCCGTTTATCTCAAACTTTAGCAT | |
| | TTTGGGAATAAATGATATTTGCTATGCTGGTTAAATTAGATTTTAGTTAA | |
| | ATTTCCTGCTGAAGCTCTAGTACGATAAGCAACTTGACCTAAGTGTAAAG | |
| | TTGAGACTTCCTTCAGGTTTATATAGCTTGTGCGCCGCTTGGGTACCTCG | |
| mRnu1a1- | CACAAGTAATGTACTTTTAAAATTAACCTTTCTATACCGGTTTTCACAGT | 330 |
| Promoter | GCGGCTGTTTTTGTTGTTCCTCTTAGTGTTAATTCACACTAAAGACTGTG | |
| | CATCCGACTCCTACATTTATGAAAGTAAATGCCTATTGTTAGAACAAAAA | |
| | AGGCTACAGAACAAAAAACAAAGCGAAATACCATCTGCTTTAGGTTCAGT | |
| | GGTATTTTCCCGCTGACAGGGAGGCGGGTTTTTGGGTACAGGAAACGAGT | |
| | CACTATGGAGGCGGTACTATGTAGATGAGAATTCAGGAGCAAACTGGGAA | |
| | AAGCAACTGCTTCCAAATATTTGTGATTTTTACAGTGTAGTTTTGGAAAA | |
| | ACTCTTAGCCTACCAATTCTTCTAAGTGTTTTAAAATGTGGGAGCCAGTA | |
| | CACATGAAGTTATAGAGTGTTTTAATGAGGCTTAAATATTTACCGTAACT | |
| | ATGAAATGCTACGCATATCATGCTGTTCAGGCTCCGTGGCCACGCAACTC | |
| mRnu1b1- | AGTCCTTGCTCTTAACTACTGAACCAACTCTCCCGTCCTATAAGTAAATT | 331 |
| Promoter | TTCAGAGCACTAATCTATTCTACTTCAAGTTTCTCCTGCATCAGATCCAG | |
| | GCCAGCTGGAGCGAGCTACACGGTTACCCCCCCTCCTCCCAAAGGGGAAA | |
| | ATAAGGATCAGGTGAAAATGTTTGGAAATTACAATAGTAGAATATAAAGA | |
| | AAGAATATGAAGGCGGCCATGAAGGGGTAGAAAGGTAGATGACCAGGCGT | |
| | CATCCCTGATGTCACGGGTATGGGCGTGGTGTATGCAGATAAGCGCGCAG | |
| | GGTCTGCCGGGTCCGCGCTCCGTGCAGAAATGTGAGGGGTTTCTCCCGCG | |
| | GCGAGGGAGGGAGCGCGGATACGCGGGTGTCAGCAGAGCGCAAGAATGTC | |
| | GTGTGCGACGAGGGAGACCCGAGATCGGCCAGGGCTAAGTGACCGTGTGT | |
| | TAAGAGTGTAGAGGCGACGGGTGTGAGCCGGGGCCGGGCAGTGGGAAAGC | |
| mRnu1b6- | CGGTGGGGCTGGCTCCTGTGCTGCCCGACTCCTGTGCTCCGACTTGGAGA | 332 |
| Promoter | AGACGGGCGTCCGTTCGTCCATACCCAAAAGAGTCGGCCACAAGGATGTT | |
| | GGCACCTGGGGGTGGGCCACGAGCGGCCAGTTAGGGGTAAGAGACGGTGC | |
| | AAGGTGACTTGTCCCTGGTCCTTCACCGCTCCAGCACTGCGCCAGTGAGA | |
| | AAGTCCAACAGGCCCCGGGATCGGGCGGCGAAAGGAAGGGGCGTGATGTC | |
| | ACTCCTGGGTGGCTGACGGGGGGGGGTGTATGCAGATGAGGGTCGCGCAG | |
| | GGGCTGCGGCGTCCGCAGCGGCCGGGGAAACGCGAGAGATTTCTCGCGCG | |
| | GCGTGGGAGAGAACGCGGGTCGCCAGATGTCAGCGGAGCGCCGAGACGGC | |
| | GTGTGCGACGAGGGAGACCCGAGATCGGGCGGGGCTAAGTGACCGTGTGT | |
| | TAAGAGTGCAGGGGCGGCGGGTGTGAGCCGGGGCCGGGCGCTGGGAGAGC | |
| mRnu2-10- | GCTCCTCCTAGGAGCTAACACTGGAGCCAGGGGGATCAAAGCTGTGTAGT | 333 |
| Promoter | GAGTGTCACAAAACATCCTAGCACTAAGGAGACTGAGACGGGAACATTGT | |
| | AGTAAGTTCTAGCCTGGGCTACAGTAAGAGACGTAGTCTCAAACAAGGAA | |
| | ATGCGCTATAAATAAATAAGATGGAGCTTCAATGGTCTGTGCATAACTGG | |
| | GGGGTTGAAGGAGCCTTCCAAAGGCTGGGTTCCGGCTCCGTTCAGTCGTT | |
| | GACTTGAGCTGGGCGGGGCATGCAAATAAGGACGCCGCCTGGTCTCCGCG | |
| | GAACTCTGGGAACGAAAAGCGCAACAAAATCCTCTCGGCCCCCTTGGATT | |
| | CCTCGGGCTTTCCCTGGCGTAAAGGTGGTGGACAGGATAGAAGAGGAGTT | |
| | TCGGCGTCGGGCGCGTGTTTGCGGTCGCGCGAGTGTTGGCGACCGTGAGT | |
| | TGAAGGTGTGTGTGGTGTTGAGTGTATGGGGCGTGTGGGCGCAGTTCGGT | |
| mRnu3b1- | ACAGAATTTACTAAATAGAGAGTGCAGTCATGGAATTGCCATTTTCCCCA | 334 |
| Promoter | CGTGGTTTTTCGTTTGTTCCTCACCGGAGGCCTCCGGTTTGAGCCCGAAG | |
| | TCTAAACCGGTGCGCGTCTGCGAGCTCGCGTGCGCCTCCGCGGCCGGAGC | |
| | ACAGTCGCGGGCGGGCATCAGGGCGGTGCGTGGCCGTCAGTGACGCATGA | |
| | CCCTTCGCAGGCAGAAGTGGGACGGGTCAAGAGAGGACTGTGATCCGATT | |
| | GGCTGTTCGGCGACCGTATGCTAATCGCGGTGACAGTCTGCGTGGTGTAG | |
| | GGACACGGTAGCGACTCAAAATGCCCCGTGGACGGGGTCTGGAGAGGTGT | |
| | CGGTCTGTCAGAGAAGGTGTCCCCGCGAGGGCAGACGCGGTGTGAGATAG | |
| | AGGCGCGGACAGGGATGTCACGGGTCGTCTGTGCGTCAGTCGCCGTGACT | |
| | AAGATGTGGGGGCGGCCGGTGCAGTGCGGCGCGGTGTGGAGCGTGAGGTT | |
| | T | |
| mRnu5g- | TTATCTACGTTGGTTTTACTACAGAAACTACTGTTCTCAGTAAAAGCAGA | 335 |
| Promoter | GAGAGTACAATGCCAACAGCTTTGAAATCCTCTGTGCTCTTGTGCCAATC | |
| | CCACCCTCAGAACAGGGAGTCTGTCGGTTATGTTTTCGTCCTTTACAGTT | |
| | CTTCGCCGTCTAATCCATTGGAAACCTCCTTTATTTAAAGGAAACCGTGT | |
| | CCAAATTCAGTGTACAGAGGTGCAAACCTCCGCCCCGCTCCTTGTAGGAA | |
| | GCCCACGGGAACTGGGCCAATCGGACGGCGCTTACTCGGCTCATTTACAT | |
| | ACCCATAACACACCGCGGCTAATGCAAATATTTTCGTGAAAAGATCTTCC | |
| | ATTACTCGAAGTTTTAAAACTAAAAACAAAATATTATTTCAAAAGATCAT | |
| | GAAGAAATTTCTGTCGGTAACAGCAGTTTCAATTGATAAATCACCATCAC | |
| | TTATCTAGGAGGTTCTGTTACTCTAGAAGTGAATTAAGCAGGACAGCTGT | |
| mRnu6- | GGCATGTGATTTTGTTTTGTTTAGGTTTTTTTTTAACTTTATTTGATCAA | 336 |
| Promoter | CATGAAATAATACAATAAGCTATGTCTTCTAACCAGCAGGCAGCCAGCCA | |
| | GGAGCCATGTGTAGCAGTGTTAGAAGCTGCAGCAGGCATGTGGGTAATTG | |
| | TGGGGAGCTTTTAGGAACAGCTAGGGAGCTGTGTGGAGCTGCAGAGATGC | |
| | AGAGGAGCCTGGAGGAACAGACCAGTGCTGTGGGCTGGGAGGAGCCCCCC | |
| | TCACAGGTACTTGCTCAACGGCTCCACGACCATAAGCCTTGAATAAGTTA | |
| | CATGGACATTTTACAAATGGCACAGGATTGATTATGTCTGCTGCCAGAAG | |
| | CCTCATGTCGATAAGGAGAGAGCTGGCCAAAAGGTAAAGTATGCTAGCTC | |
| | CATACAGTGCAATAGCCACGTAGTCTCACAGAGAAAGAGGCAGGCCTGCA | |
| | TCATATCCAAATATGGCCAAGAATTTTATTAAATTAAAATGCAAACAGCA | |
| mRnu7- | TATTTTTAATGAAGCAGGGCCATGGAGCCCAAGCTGGCCTTGAACTTCTC | 337 |
| Promoter | AGCTTTTGTGCTGGTATCACAGAAATGTGGCGCTATGCCCGGTCGGGCCT | |
| | GATGTTCCAGAGTCTTTGCAGTGTGGGGAACTTGTAAGGATGAGACTACA | |
| | AGACATCGGGCCACATCGCCTGCCACTACTTAAGTCCGATTCACTTCGGC | |
| | TTTAGCTCCAAGCCTTTAATCTCGCGAAGCTCTTTTTTTTTTTTTAACAA | |
| | CATAGGAGCTGTGATTGGCTGTTTTCAGCCAATCAGCACTGACTCATTTG | |
| | CATAGCCTTTACAAGCGGTCACAAACTCAAGAAACGAGCGGTTTTAATAG | |
| | TCTTTTAGAATATTGTTTATCGAACCGAATAAGGAACTGTGCTTTGTGAT | |
| | TCACATATCAGTGGAGGGGTGTGGAAATGGCACCTTGATCTCACCCTCAT | |
| | CGAAAGTGGAGTTGATGTCCTTCCCTGGCTCGCTACAGACGCACTTCCGC | |
| mRnu11- | GTTCTTTGCTTTTACAGACCGTCTCCTGTGTGTCCCTGTCAGAGACCTGA | 338 |
| Promoter | ATTCGGTTCCTAGCACCCATATGTTAGAACATAACGTCCAAGTTGGAGGC | |
| | TACAAGTGGCACTAAATTACACATTATCAGTTTTGACAGGTTGGGGCACC | |
| | GTGTAACCCTAGTAACTTAGCGAAAGGCTCCTCGAACCCAACATCCCACC | |
| | TCTAGCTGGGAGCAGCTGTTTTGCACCAGCGCCGCCTACCTCTCCCTCCG | |
| | CGTCGGCCAGAGCATTCCCAGCAAGCACTGCTCTGATTTGCATATTGACT | |
| | CACGGACTTTCCTTTACTGCTATACAAAAAACGACACAACAGTTCTCTTT | |
| | GTGAAGAGCTTTCCCTCAGCCCGAGAAGAATCGATAGTTTGCCTTTTAGC | |
| | TTCGACAATATACAGTTGAAAGTTGGTTAGACTTTATTTTCACCTTTACC | |
| | GTAAGATGGGTGGACCGACAATGCCACTGTGCTTCCGAACGCGCTCGAGC | |
| mRnu12- | GAAGCAGCGAGGCCCCTACGAGCCTCGAGGAAAAGGGAAAGGGCCGCTCA | 339 |
| Promoter | CCGTCCCTTGGCCGCCGTCCCGCGCTTCCGGATGAGCTCGTCCAGCGAGA | |
| | GATCGGCCATCTTGCGGCGCGCAGCTAGCGGAGAACGGAGGAGAAGCCGA | |
| | CTGCGGCGAGCCCGCCCCGCGGCCGGAGTCAAGAGCGGCTTCCGGCAACC | |
| | CGGACGGCCAACTCTCGCGACAGCTCAAACGAAAAGCTCGAGACGGAAGG | |
| | GGTGGAGCCTCTCTCCCCGTGAGCCTTTGCGGTGCTCGCTTCTAATTTGC | |
| | ATGGAGGAGTCCGGAGCCTTATGGGCTCTCTCTCCCCCCTCCTCCTTTTG | |
| | CTAATGAGGAATTAGAATTATATCGATCATAAACCATTAAAAAGCATTAT | |
| | CAAGAGGACAAGTCTTTTAGTCATACAGCCGATCGGACACTCACCATACT | |
| | TGTAATGAGAATATAATTTCTTACCCCTGAGGAACGTAGACACGTTCCTC | |
| mRn7sk- | CGCTTCGGTGTGTCACTTCGGCCACAGAGGGAGACAGACGATTACGGCCC | 340 |
| Promoter | ACGGAAGGCCGCGTGAGTCTCGTGAAGCTGGAGATGCGCTGGGTCTACCT | |
| | TTCGCCGTCCGCTCCGCCTTGGCAGAGGCGCCGACACGCACCGAAGGCAG | |
| | AGAACCCATCTCGTATGGGACCGCACCGGACACGGGCGCCTGGGCCAGGA | |
| | GCAGAGCCGGGCCGTAGAATAGACATGGCCGTCGGGGGCGGGGCTTCGGA | |
| | AGGTTTAACCAATCCAAACTGTTGTATTTTGCATAGCCCCAAAGCATTTT | |
| | GGTTAACAGTAAAAACATCCTAAATTTAAGTATTTTAATTTAAACTTAGA | |
| | ACGAAGCGAGTATAAAAAGGATTATTTAACCCTAAAACGGATTCAGGATT | |
| | TGTTATAATATCAAGTACAGTCGGCTACATAAGGTCACCACATGTGTAAA | |
| | GTTACAAAATTCTATGGCCTTATATACCTACCAAGAGCCTGCTTACTCTC | |
| Mm U7 3′ | cccaatttcactggtctacaatgaaagcaaaacagttctcttccccgctc | 23 |
| Region | cccggtgtgtgagaggggctttgatccttctctggtttcctaggaaacgc | |
| | gtat | |
| Hs U1-1 3′ | ACTTTCTGGAGTTTCAAAAGTAGACTGTACGCTAA | 24 |
| Region (U1 | | |
| terminator) | | |
| hRNU1-1- | ACTTTCTGGAGTTTCAAAAACAGACTGTACGCCAAGGGTCATATCTTTTT | 341 |
| Terminator | TTGTATTGGTTTGTGTCTTGGTTGGTGTCTTAGGTGTTAATCCTACAGTG | |
| | GAGGGTTTATGGGAATAGGAAGTAACATGTCGCCTGCATGTCATAGGAGA | |
| | AAAAGCGAGCATCAGCCGTATCGGCTTTGTAACACAAATTAGCTATCGTG | |
| | AAGTCCGCTCAGCTCTTCCCTTTCTACCCTGGCTGCTTTTTGCAGGGATT | |
| | GGTCCGTGGTCTCCAGTCTCTTGGGTTCTCACCCTGTGTGAAAATCTTCG | |
| | TGTTTTTCCCTACCCCCCAGTCACCTCTTACACAGCCTCTGCTTCCAAGC | |
| | GCAGCCCCCACAGGAGTTTGTAGGATTTCTGTGCTAGCGGGGAATGTGTT | |
| | CTCACCTCATAGAGCCAGGTAGAAATTATGCAGATGGGCAGTTCTCTGGG | |
| | AAGAAAGCAGGGCCTTTGGGGCTCTCAGTGTCCCCGTTGGGTTGTAGACA | |
| hRNU1-2- | ACTTTCTGGAGTTTCTAAAAGTAGACTGTACGCTAAGGGTCATATCTTTT | 342 |
| Terminator | TTTGTTTTGGTTTGTGTCTTGGTTGGCGTCTTAAATGTTAATCCTACAGT | |
| | GGAGGGCTGGCGAATAGGAAGTAACATGTCGCCTGCACGCCATAGGAGAA | |
| | AAAGCGAGCATCAGCCGTATCGGCTTTGTAACACAAATTAGCTATCGTGA | |
| | AGTCCGCTCAGCTCTTCCCTTTCTACCCTGGCTGCTTTTTGCAGGGATTG | |
| | GTCCGTGGTCTCCAGTCTCTTGGGTTCTCACCCTGTGTGAAAATCTTCCT | |
| | GTTTTTCCCTACCCCCCAAGTCACCTCTTACACAGCCTCTGCTTCCAAGC | |
| | GCAGCCCCCACAGGAGTTTGTAGGATTTCTGTGCTAGCGGGGAGTGTGTT | |
| | CTCACCTCATAGAGCCAGGTAGAAACTACGCAGATGGGTGCTGTTCTCCA | |
| | GGAAGAAAGCAGGGCCTTTGGGGCTCTCAGTGTCCCCGTTGGGTTGTAGA | |
| hRNU1-3- | ACTTTCTGGAGTTTCAAAAACAGACCGTACGCCAAGGGTCATGTCTTTTT | 343 |
| Terminator | TCGTATTGGTTTGTGTCTTAGTTGTTAATCCTACAGTGGAGGCCTGGGGA | |
| | ATAAGAAGTAACATGTGGCCTGCACGCCATAGGAGAAAAAGCGAGCATCA | |
| | GCCGTATCGGCTTTGTAACACAAATTAGCTATCGTGAAGTCCGCTCAGCT | |
| | CTTCCATTTCTACCCTGGCTGCTTTTTGCAGGGATTGGTCCGTGGTCTCC | |
| | AGTCTCTTGGGTTCTCACCCTGTGTGAAAATCTTCGTGTTTTTCCCTACC | |
| | CCCCAAGTCACCTCTTACACAGCCTCTGCTTCCAAGCGCAGCCCCCACAG | |
| | GAGTTTGTAGGATTTCTGTGCTAGCGGGGAGTGTGTTCTCACCTCATAGA | |
| | GCCAGGTAGAAATTATGCAGATGGGCGCTGTTCTCTGGGAAGAAAGCAGG | |
| | GCCTTTGGGGCTCTCAGTGTCCCCGTTGGGTTGTAGACATAACACTCTTA | |
| hRNU2-1- | CCTCCGGGGATACAACGTGTTTCCTAAAAGTAGAGGGAGGTAAGAGACGG | 344 |
| Terminator | TAGCACCTGCGGGGCGGCTTGCACGCCGAGTGCCTGTGACGCGCCGGCTT | |
| | AACTTAACTGCTTCCCTGAAGTACCTTGAGGTTCCTGATGTGCGGGCGGT | |
| | AGACGGTAGGCTTATGCGGCACGCTGTCGTTTCCACCGTGGCTACTGCGC | |
| | TTTGGGAAGGCCACGACCTCCTCCTTTGGGGAGGTCCTTAGGATCTCAGC | |
| | TTGGCAGTCGAGTGGGTGGCGACCTTTTAAAGGAATGGGACCCACCCGGA | |
| | GTTC | |
| hU3- | TTCCCTTCTTGTAATACAAAATAATAACAACCACAGAGGACATCGCAAGT | 345 |
| Terminator | AAAATGTGTATAACAACCCCATCTAAAGAACCCTATCATCTTTCTACTAT | |
| | CTGTCTACCTAAATATGTATAGTATAAATAACCCTATATAGCACTCTAAG | |
| | CAACTTAAGTTAGGTAACTTAGAAAACTCTTTTTTTTTTTTGAGACTGAG | |
| | TCTCACTCTGTCGCACCCAGGCTGGAGTGCAGTGGCGTGATCTCGGCTCA | |
| | CTGCAACCTCCACCTTCTGGGTTCAAGTGATTCTCCCATCTCAGTCTCCC | |
| | AAGTAGCTGGGATTACAGGCACGCCACCATGCCCTGCTACATTTTTTTTT | |
| | TTTTAGTAGAGATGAGGTTTCACCACATTGGCCAGGCTGTTCTCGAACTC | |
| | CTGACCTCAGGTGATCCGCCCACCTTGGCCTCATGAAGTGCTGGGATTAC | |
| | AGGTGTGAGCCACTGTACCCAGCCAGAAAACTCTTAAAAAAC | |
| hRNU4-1- | CTGAATTTTCTTGCAGTTGAACAACAGAGGCTTTTTTTGTGTGTGTGGGG | 346 |
| Terminator | GTGCTTGGTTTTGGGAGGTTGAAGAGTACTTGTTCGCAAACTCTCTAAAT | |
| | GAGAGATGGGGAAGTGTCTTACCAGCTGATTCGCGAGAGCACCTGCAAGT | |
| | TTACCTGTTTTAGTGATTTGCGTTTATGAAAGTTGGAGTTGCTGATTTTG | |
| | TGATCTCTACTTTTAAGGTAAAAGCAGGGCGGTGTTGACTTTTCTTGCCA | |
| | GTTGGCTGTCCTGTTTTCTTTCTCGCACTGTTTTCTTTTTGAGACGAAGT | |
| | CTGTCGCTCAGGCTGGAGTGCACTGGCGTGATCTCGGCTCGCTGCAAACT | |
| | TTGCCGAACCCCTGTTTAGCGATTTCCGTTTG | |
| hRNU5A-1- | ATATGTGGTAATCCAACAATAGAAATTATTTTTAAGTTTGTGTGTTCCTT | 347 |
| Terminator | TTTCTGTTCAATGGTGCTTTTGATATTGTTGTAAAGCAGTGACTAGCAGA | |
| | TTCTGTGTGGTAAAAGCACTGAACCCTGTTTAGTTCTTTTCTCCCTACCT | |
| | TATTGGTAATTATTTCTGTGTATATATGTTCCAAAGAAATGCGGCTTGTA | |
| | TATTCATGCTTTTCAACTTTTTGTGATAGACAGTTGATACACAAGTAGTA | |
| | CCTCCTCCGGGATCTTCTTAGTCAAGACTGTTTGGTAGATGCATGTTTTT | |
| | TGTTACTTGTAATGTACAGTATTCAGTTCATTTTCTTTTTGCAGCACTGT | |
| | CCGGTTGAAACACAACGCGAGGATCGGGCGTGGTGGCTCACGCCTGTAAT | |
| | CCCAGCACTTTGGGAGGCCGAGGCAGGACAATCAAGACCAATCCTGGTCA | |
| | TCAAGGCAGGAGAATCAAGACCATCGAGGTCAGGAGATCAAGACCATCCT | |
| hRNU6-1- | ACATCAGGTTGTTTTTCTGTTTTTACATCAGGTTGTTTTTCTGTTTGGTT | 348 |
| Terminator | TTTTTTTTACACCACGTTTATACGCCGGTGCACGGTTTACCACTGAAAAC | |
| | ACCTTTCATCTACAGGTGATATCTTTTAACACAAATAAAATGTAGTAGTC | |
| | CTAGGAGACGGAATAGAAGGAGGTGGGGCCTAGGCAGATTCATCTCTGCG | |
| | GTGCATTTTGCCTCTGGCCCTCGGGCCCTAGTTTGCGATCTTTCCCATCT | |
| | TGCCTCTGCTTCCCTCTGCACAATCCTGAGTATTGCAGTACCTTACACTT | |
| | AAGGAAATTTCGTCTTGCCAAAGTTGATCCATTTCAGCTCCGAAACATAA | |
| | CAGGAACTAGTGCAACGATAAACGTATGAGGAACTTGCAATAAGAGTGAC | |
| | AGAATCCTTTGAATCAAAAAAAAAAAAAGCCACCACTTAATGAGTATCTA | |
| | CCATATGTCAAGGGCTTCACCAATATTTCATTGAAATATTCCAGACCA | |
| RNU7-1- | CTTATGATGTTTGTTGCCAATGATAGATTGTTTTCACTGTGCAAAAATTA | 349 |
| Terminator | TGGGTAGTTTTGGTGGTCTTGATGCAGTTGTAAGCTTGGGGTATGAAGGT | |
| | TTGGGCCACGCCTGGGCGCTTCCGGCTGCGCCGGATGCTGTTTCCTTTCC | |
| | GCTCCCAGGGGCGTTGGGAACGGTTGTAGGACGTGGCTCTTTATTCGTGA | |
| | GTTTTCCATTTACCTCCGCTGAACCTAGAGCTTCAGACGCCCTATGGCGT | |
| | CCGCCTCGACCCAACCGGCGGCCTTGAGCGCTGAGCAAGCAAAGGGTGAG | |
| | AATCGTCCTAGTCAAGGCATAGGCTGCTGGCCTGGGGTAGTCAAGGCATG | |
| | GGCTGCTGGTCTGGGGAGGATGCGGGCGGAGGATGTGGGGCGACAAACCT | |
| | GGCTACGTCCGCCGGGAAAATGGGGTAGGGGACGCCGGGTACCGTCCTTC | |
| | TAAGTGGGGCGCTTGCCCCCAAGACTTGGGATCTTATTGGGTTACCTACA | |
| hRNU11- | TCTTTACTGTTATATGTTAGGCGAAATATTACGCGTTTGGAGTAAGTGGT | 350 |
| Terminator | GCTTTTTGTAACTGAAAAGAGATTCTGTGTGTGTTTTTTTTTTTTTAGAG | |
| | GCTGCATAGTTATTTGTATGAACCGCAGGTGACCTAATTAGCAAGGTAAT | |
| | TCAGACCTGTATCCTAGCACTTAAGAAGTGGAAGTGGGATAACCCTGCGT | |
| | GTTCTCGTGTGGGAGGCTAGCTTAAGCAACAAAGCAGGAAGGCCCCACCA | |
| | ACAAAAGAATTTAAAAATTATACGTGCGTGGTGGCGCGCGTATGAGGAAA | |
| | TTATTTGGCAACTGTGTTACAGTATAGCAGCAAATGGAATAGACCTAGTC | |
| | CCTGACTTTAGGAGACCTGCCTCAGCCCCCCGAATGGCTGGGACTACAGG | |
| | CGTGCGCCTCCGCGCCCAGCTAATTTTTGCATTTTTGGTAGAGACGGGTT | |
| | CACCATGTTGGCCAGGATGGTCTCCATCTCTTCATCTGGTGATCCGCC | |
| hRNU12- | ACCTTATTCACGCCTAAAAAGTAGACTGACTGTGGGGTGGTCGTGTTTTT | 351 |
| Terminator | TGTTTCTTGTTGGTAGGTGGTGAATGCGTTTTTTTCGTTGTTTTCTCCGT | |
| | TACTCAGGCTGCCAGTTGCTTGGCAGTCTTGTCGCTGGCTGTGGACGCTC | |
| | TGCACTTCATCACCGTCCCCAGCTGCGCTTTGAGCCGGTCTAAGGTTGCC | |
| | CACAGTATTGACGTTGGGACCCACGAAACTGGCAATTTCCATGTGTGCGG | |
| | CCTTACCCAGTTCTCCCAAACTTCTGCGTATAACCGCTTCTCTGTGCTTC | |
| | AGAAAGATAAGTCCGGCCCCGGCCTCACACAGCAGCTCAGTTCGTGACAG | |
| | CGTTTAATATGTAAAATGGAGCAAATAATTTATAGGGCGTTGGGAGAGTT | |
| | AAAGAGACTAATTCATTTACGTGTTAAATACAGGGAATGGCTTTTGCATT | |
| | GATATAACCCCAGCCTCCAGCATGCGCCAGACCTGACGTAGGTGTTCGGC | |
| hRN7SK- | TTTGACCCATTACCCATCTAAGTTAGATGCTTTTTTAAATGTTTTTTAAT | 352 |
| Terminator | TTTTAAATTTTTAATTTTTTTCATTATTTATTTTTTATTTTTGAGACGGA | |
| | TCTCGGCTCACTGTAACCTCCACCTCCCGGGTTCAAGCGATTCTCCTGAC | |
| | TCAGCCTCCCGAGTAGCTGGGATTACAGGCGCGCGCCACCATGCCCGGCT | |
| | AATTTTTCTATTTTTAGTAAAGACGGGGTTTCGCCATGTTGACCAGGGTG | |
| | GTCTTGAACTCCTGACGTCAGGTGATCCTCCTGCCTCGTGCTGGGATTGC | |
| | AGGCGTGAGCCACCGCTCCCGGCCCTTAGATGCTTTTTAATCAGCAAGTA | |
| | CGCAATGCTTTCCTGACAGGAATGTCAAGTCCGTCAGGAAATCCACATAA | |
| | GGGTGTTAAGCAGGCAAAGTACCACATACAGATTAAAATCAAAAGCACTG | |
| | TCAACGCTTATTTAATTTATACAGTAGACCCTAACTTTTCTAATTTTGTG | |
| mRnu1a1- | GTTTACTTGGTTTTAAAAATAGCTTGCACTAGCGATACCGCGAATATGGT | 353 |
| Terminator | TATTAGGTTTGTTAGGCACAGTCGTGTCTTACTATAGAAAAATAACGTAG | |
| | TGTTCATTTTGCTGCCTGTATGTGTTAATTTGTCCTTATTGCGCCATTGT | |
| | TCTTGTTAAGTCTTCTGTAAGGAGTTGCGGGTTTCAAACTGTCAGTCTGA | |
| | GAGCATAAGCTCACTTTTCAGTCAGTTGAATTGAATGTTACATTCGATTG | |
| | GTTCTGGATATTGATATTACCCAAGGCTTGTCCTGTTTGTAAGTCTTTTC | |
| | CTACACCTGACAATATGATTATGTTTACAATGTCCCTAGAACTCTGGGTG | |
| | TATCGTTCCCACTGAATAAAATTTGATCTCTAAGTTGACCTATAAATTTA | |
| | AGTACCAAAAAACTGGTTTGTAAGATTTTGGAAGGCAGAGGCAGGGAAGA | |
| | GACCAACGTGGTCTACATATAAAGTACCAGGTACATATAAAGTACCAGGT | |
| mRnu1b1- | ATTTTTGTGGTGCTAAAAGTTAGATTGCATTCCGCCCTTCTCACGTCTCT | 354 |
| Terminator | TTACGTGTTGTTTGCGAGGCGTGGCCTCGGAGGTAAATGGTCTCCTTTTA | |
| | CCTCAGATAAGCTTACCTTTGCTCTGTGAGTAAGAATGTAGCTACACTTC | |
| | CAAATTTAGCTATTGTCCTTTGCGGTCCAAATGAAAATATTACCTTCCGA | |
| | TCTAACAATGTTAAACTAGTCCCAGGCCCTTCTATCGATTGCCAGAATAG | |
| | ACTAGACTACTACACAGACACACCCTCTCAAATCAGGCCAGCTCCTGCAA | |
| | CCTGCACCTACAGTTTGTCCCCTGGGACAAATGAAAGGACAGGCCCTCTT | |
| | TCCCCCCCCCCCCCAAATCAGAGCACACACAGATCTTGGGGTCTGGGGCA | |
| | GAAATTTCGTTCATGGAAAAAACAAACAAACAAACAAACACGATCAAAGG | |
| | AAGCTCGTTCCCTTTGGCCTCAGGGTTTCTTAGACGCCGTGTTCCC | |
| mRnu1b6- | ATAACTGGTAACCAAAAGCAGATTACTTTCCCCCTTGTGGTCTTCGCGTT | 355 |
| Terminator | TGCGGACGGGAGAGAACTTTCGGCCATTTTCCTTTTAGAAATTTAACTTC | |
| | TTGAAGGCCACCAGGTGACCCTTACTTCCCTCTCACCTTTCCTTCTACCT | |
| | GTACTTTCTCTATTAAAAAGCCTGCAGAAGTACCCTTGACAAATTGCCAA | |
| | AAATGACACCTAAAAAAAAAAAAAGGAAAAACGACACCTTAGGTAATTAT | |
| | AGGTTGTAAGAAAAAGATTTGACCTCTTGGAGTTTTTATTTCTTAATACC | |
| | AAAGGACACCCAAGGAACGTATCTCTCAAAATTGGGTTTCAAACCTCAGC | |
| | CGTTTCCTTCTTAGTTCCAGTGCTTAACACGCAACAGACCTGCACACCAC | |
| | TACACTGCATACGAGTTTTAAAGTTAATAAATCAGTCACCCCTCCATAGT | |
| | CTTCTACCTACTTGAAGACAGAAACGGCTGCTAGGAAGCAATTCTTC | |
| mRnu2-10- | CTGGGGAATAAGAGTGGTTTAAAGAAAGAACAATTTGAGAGATCTGCTTA | 356 |
| Terminator | GATCTAATAAAACCCAAGTATAGTTTCTTTAGACGTCTTATATCTCACGT | |
| | AGGACCTCTTATTTCAGACTCACTGCAAGAACAAGCTAAAGAACTATATA | |
| | CAGTCAGGAACAAGGTGAGCCATCGCGGTTCTCAGTCCCATGATCTTAAG | |
| | AGTTTTTCCTCTTCCCCTCTTCCCTGGCTGTCCTGGAGCTCACTCTGTAG | |
| | ACCAGGCTGGTCTCAAACTCAGAAATCCACTTACCTCTGCCTCCCAAGGG | |
| | CTGGGATTAAAGGCATGCACCACCATTGCCCGGCAGGGTATGTGGACTAT | |
| | GCTGTCCTTCAACTCAGAGATCGTGGTACTTTAAATCTCATTTTCCGAAA | |
| | GAAAAGAAAAGAAAGGAAGGGGGGAAATAAAGCCAGTATATTTTGCACCC | |
| | ACAATCTGAAGTTCTACAAATATTGTTAGAAAATGCAAAGGACCCAAGTC | |
| mRnu3b1- | CTCGGTTTATCTTAAAGGGTTTTAAATATAGAAAGCTTCCTTAGTCTTAT | 357 |
| Terminator | GGGTGAGAGTGCTGTTTAAGCCTTACCTAGGTATGTCTTTGAACATTTAT | |
| | TACAGATTGTTATTTGTGACTATGACCACTCAGGTGTTCTGTTCTTGTGA | |
| | ATTTAGACACACTCAGAAAGGCTACACACTCAAAGACCACACCAAAGTGA | |
| | AGTACTATCTGGGCCGTGAAACTGGTCACATATCAGTTATTTTGCAGTAA | |
| | AACAAGGAAGTCAATCATACTGCTTCAGTGGGTCAGGGAGTCAAGAATGC | |
| | ACAGTACAAGAGCTGGTGAGATTCCTCAGCAGGTAAGAGCACTGAATGCT | |
| | CTTCCAAAGATTCTGAGTTCAAATCCCAGCAACCACGTGGTGGATTTGAA | |
| | CAAAGGATGAAAACAACCATCCATAACCAGATCTGATGCCCTCTTCTGGA | |
| | GTGTCAAAAGACAGCTATGGTGTACTTACATAAATAAATAAGTAAAAACA | |
| mRnu5g- | CCACATTTTGTGTTTAAAAATAGAAATATTTAAGTGAGATCAGTTTAAAT | 358 |
| Terminator | CTGCTTTATCTAGGGTGTCTAACTGCTTGCATCTTTTTAACTTTTCCTTA | |
| | TTTGTGAGAAGGTCTGTAAAACTTATTATATGTTAGTACACTGTAGCTGT | |
| | CTTCAGACACTCCAGAAGAGGGATTCAGATCACCTTACAGATGGTTTTGA | |
| | GCCACCATGTGGTTGCTGGGATTTGAACTCAGGACCTTTAGAAAAGTAGT | |
| | TGGGTGCTCTTACCCGCTGAGCCATCTCACCAGCCCTTTTTTTTTCTTTT | |
| | TTCCAGTTCGGGTTTCTCTGTGTGTAGCCCTGGCTGTCCTGGAACTCATT | |
| | CTGTAGACCGGGCTGGCCTCGAACTCAGAAATCTGCCTGCCTCTGCCTCC | |
| | CAAGTGCTGGGATTAAAGGAATGTGCCTTCATTGCCCGGCTCTAGGGCTT | |
| | TTTGTTGTTGTTTGTTTGTTTGTTTGTTTGTTTGCTTTTGTGGATGGCCT | |
| mRnu6- | AAAACCAGTAAGGGAGAAAGGTCAAGTAACATATAAAGGAAGGCCTATCA | 359 |
| Terminator | GAATTACACCAGACTTTTCACCAGAGACTATGAAAGCCAGAAGAGCCTGG | |
| | ACAGATGTTATACAGACACTAAGAGAACACAAATGCCAGCCCAGGCTACT | |
| | ATACCTGGCCAAACTCTCAATTACCATAGATGGAGAAACCAAAGTATTCC | |
| | ACGACAAAAACAAATTCACACAATATCTTTCCACGAATCCAGCCCTTCAA | |
| | AGGATAATGACAGAAAAGAAGCAATACAAGGACGGAAATCACGCCCTAGA | |
| | ACAACCAAGAAACTAATCATTCAACAAACCAAAAAGAAGACAGCCACAAG | |
| | AACAGAATGCCAACTCTAACAACAAAAATAAAAGGAAGCAACAATTACTT | |
| | TTCCTTAATATCTCTTAATATCAATGGACTCAATTCCCCAATAAAAAGAC | |
| | ATAGACTAACAGACTGGCTACACAAACAGGACCCAACATTCTGCTGCTTA | |
| mRnu7- | CCCAATTTCACTGGTCTACAATGAAAGCAAAACAGTTCTCTTCCCCGCTC | 360 |
| Terminator | CCCGGTGTGTGAGAGGGGCTTTGATCCTTCTCTGGTTTCCTAGGAAACGC | |
| | GTATGTGCTAGAGCCACGCTCTGAGACTTCCGCCTCGTGCGGTCCCGCTT | |
| | CCTTTCTGCCTCCTCTGGCCTGCATCCGTGGGGGAGGTGGCTGGCTGCAG | |
| | GGTTCTCCGGATCTCTTCTGTGTTCCCACTACTCAAGCACCGAGTGGCGT | |
| | TCTATGGCGTCCGCCTCGGCTCAGCCCGCGGCCCTGAGCGCGGAGCAGGC | |
| | CAAGGGTGAGGAAAGAGCCTAGTCTGGGTGTGGGCCGTCTTCTGGGGGGA | |
| | GGGCGCGATACTATTCTTTGCCTCTCCAAGTGGGGCCCTTGCCCATTAGG | |
| | GCGAAGGGTTGGGAGGACAAGCTTATCGGGTTGCTTGCAGGCCTCGGCCC | |
| | ACTAATTCCCTGCCTCTTCCCTCCTCTGGGCTCGCCCGCCGTCCTCCGCG | |
| mRnu11- | GAATTTGTTAAATTACAGGAGGAAGCTTTTTTAGTTCATTTTACAAATAC | 361 |
| Terminator | TTTCTTGTTAGGTAGATAATACCTTCTAAGGTTATTATCTGGATCTTCTA | |
| | AGTCTTTTTATCGCTAGCAAGTCTAAGTTTCTGGACTTTGGAATTAGAAG | |
| | TTAATGTCGTAGGCGGGCATGGTGGTCCACGCCTTTAATCCCAGAGTTTG | |
| | GGAGGCAGACGCAGGTGGTTTTCTGAGTTCGAGGCCATCCTGCTCTTCAA | |
| | TGTTAGTTCCAGGACAGCCAGGGTTATACAAAGAAACCCTGTCTCGAGAA | |
| | ACAAAACAAACAAAAAAAGAGTAGCTGAGTGCTCTGAGTTGTCTCTCCAG | |
| | CCCCTTAGCTATTTATTTTCATTTAAATTATTTTTGTTTTATTCGCTTGT | |
| | GTGCCTGAGTTTGAATTTCCCGGGATTAACAGTTGAAGACTAGGGCTGGT | |
| | GAGATGGCTCAGCGGTTAAGATTGCCGACTGCTCTTCCAAAGGTCCTGAG | |
| mRnu12- | ACCCCCTAATTCTACAAGAATAGAAAGCTTAGCAGCTCCTCTGAATGGTT | 362 |
| Terminator | GCTCTCAGGTGCTAGTGGTTGCAAGTCGTATGTTGATGCCTGCCTTTGCC | |
| | CTACCTGGTGTGTGAGCGTGAGCGCGCCCCACCTCTCCAGCCTCTCTCTT | |
| | ACTGTTTTTCAGACAAGATGGGACTGTTGTTCTCCTACTGCTATGTACCT | |
| | CAATTTCAATTGATCATGCCTGGACATAACTGCCCATGTTGTAAGGTCGT | |
| | CTACGTTGTAAGGTCGTGCTCAGTTTCTGATGCCTAGACTAGTCACCTTT | |
| | CCGTTTGCCTCCTGACTGTGTAAATGAGGCAAATGAAGGTGGTCTCTTAA | |
| | CTGACATGTTAGTGTTTGACCTATGGGATAGTTTCTCATTGTTGAGACAG | |
| | AATTTCTAGAAGCTGGTCCGCTGAGCGGCTAAGAGCACTTGCTGATATTG | |
| | CAAAGGATCTACCTGGGTTTGGTTCTCAGCACTCACATGGAAGTTCACAT | |
| mRn7sk- | TGTAGTTCCTGCAATTTAATTTTCGTTTAAAACTTTATTTTATTCTTTAA | 363 |
| Terminator | CTTAAAAAAAATATATA | |

TABLE 9
Sequence for Scn2a luciferase reporter.

| Sequence | | SEQ ID |
|---|---|---|
| Name | Sequence | NO: |
| Scn2a | ggcctccgcgccgggttttggcgcctcccgcgggcgcccccctcc | 364 |
| Luciferase | tcacggcgagcgctgccacgtcagacgaagggcgcagcgagcgtc | |
| Reporter | ctgatccttccgcccggacgctcaggacageggcccgctgctcat | |
| | aagacteggccttagaaccccagtatcagcagaaggacattttag | |
| | gacgggacttgggtgactctagggcactggttttctttccagaga | |
| | gcggaacaggcgaggaaaagtagtcccttctcggcgattctgcgg | |
| | agggatctccgtggggcggtgaacgccgatgattatataaggacg | |
| | cgccgggtgtggcacagctagttccgtcgcagccgggatttgggt | |
| | cgcggttcttgtttgtggatcgctgtgatcgtcacttggtCGGTA | |
| | AGTTTAGTCTTTTTGTCTTTTATTTCAGGTCCCGGATCCGGTGGT | |
| | GGTGCAAATCAAAGAACTGCTCCTCAGTGGATGTTGCCTTTACTT | |
| | CTAGggtacGCCACCATGGGCACAACTACTGAAACAGAAATAAGA | |
| | AAGAGACGGTCCAGTTCTTATCATGTTTCCATGGATTTATTGGAA | |
| | GATCCTACATCAAGGCAAAGAGCAATGAGTATAGCCAGTATTTTG | |
| | ACCAACACCATGGAAGGTATGTTAAAAGTCCTGCGTCACAGTTAC | |
| | TTGGTGCTTTGGTAATGATGAAAAAACACTTCATAAATTTCAATA | |
| | AAATACTTCCTGACTTGATATTGTATCATTATTACACATTTTACT | |
| | AAATAACAGTAAAATCCGTGCATAACTCATGGATTCTATTATCTT | |
| | CCACAGAttttttttttttATATTTAGCCTCCAGAAAGCTGCTGC | |
| | AAATGTAAGGTATATTTTGAACACCACTTTCATACATTAAATTCT | |
| | AAACATTGAAACTTGTGTGCATGACGTTGAAAAGAGTGTAATGAT | |
| | AAATGCTTATACTTATGATGATGCTAAGCCATTTGGATTATATTA | |
| | ACTGCTTGAGACACAAGTTATAAAATCCTATGACTTAACCAGAAA | |
| | TATAAATTAAAAATGTGAATTAGGGTTTGATATTAACTTCCTTGA | |
| | AGCAAAGTGTTTAAAATTTTGTAGTCCTACTTTTGCCTTTCTCTG | |
| | ACCAGATTCTTACAATATATCAGCTTTCTCTTTAGTTGCAGATTT | |
| | TATCTGAATAGTTAACATAATGTGTAGCAGTCTGGATCTCAGAAT | |
| | GCCaaaataaagactttggggacagcttaatctgtgatcaatttc | |
| | tggctctgccatatgttaaatgtgttaatttgtgactttgaattt | |
| | cagtctcctcatcagtaaaatgtggatgatgatgtttaggcataa | |
| | ggttgttgaatggattaaataagccttcttagataaaacactgat | |
| | gtatttggcatgcagaagacagttaataaatattatcaatattaG | |
| | TTGTTTTGTTGTTGTTATTTTTGTTAATTCACATGTTTTTGCCTT | |
| | TCCATACTGTAAGTGAATTCAAACAACTGTCAACTTCAACTACTT | |
| | GGAAAATATTTTCATGTAAAATGTATTCTATCCCCCTTCCTTGCC | |
| | CTCCTATTCCCTCCTCTCCCTATCTCTTTACAAACCTTCTCCCTT | |
| | GTACCCCTTCCCAGGTAtgtgtgtgagtgtgagtgtgtgtagatg | |
| | tgtCAAGGGAGAAGAGAAAAGGAGAATGAAAGCAAAAGAGAGCAA | |
| | GCATACACGTCCCTTTCTTATTGATAATTAGATTTTCTCTTGAGA | |
| | TTGGATAGATTCCTGGAATAATTCTTTTCCTGTCTGTATGCAAAG | |
| | ATCCCATAATATTATTAATACCAATACGAAAAGCCTGAAAATCAC | |
| | AGCCAGAAAAAATTCACAGTGTAGACGACTGTGTACATCACAGAC | |
| | AAGTCAGTATTACAAAACCCAATTTTCATAGTGTCCTATTTCAGT | |
| | ATCCTAATGCAATTCACTGATTTCAATTGAATATTAAACTCTAGT | |
| | ACGTTCTTCCCCAACCTCGCCTGCGTTAGCTTGCACTCCCTCTTC | |
| | CCCCCAGCTGCCAGTAGCTTGCTCCTCCCTGTCCCTCCAGGTAAA | |
| | TCTTTTGAAGATTGTCTGGCCTTCCGCTCCTTGCCATAGCAAAAC | |
| | CACTGAGAGGAAGCTGCCAGTGGTTCTGCTACCGATGTCAGCAGC | |
| | ATGTCTGCTCCCTAAAGCAGGAAGTAGAGAAGGAGACAGGGTAAG | |
| | TCTAAATCAACAGTCATGCTTTGCACTTCTGATAGCATTAAGTTT | |
| | GAGCTAAATAAGACATTACTTAAAAAACCTCAAATATCCACAAGA | |
| | TTGGACTTGCCAACTAATTAAGATTTGGAGTTCAAAATAAATGCA | |
| | CCCACACCTTTCTCCATGGAACTATGTGACATGGGGTTGCTTAGG | |
| | ATGGAAAGGATGTTCTAGGAATAAGTGCAATCTAGGAAGCTGAAG | |
| | ACTGAGAGTGTTTTCGTTTTATTATCTGCAGAGCTTTTGACTTGT | |
| | GTATTTGTGAGAAATAATGGCCAAGTTTTTATTCTGTTTTTAATC | |
| | AGTTATCTAGAATGAAAACTGACTTTTCTTTATTCAATTGTATGT | |
| | AGACACATTGAGTGTGACATTTGTCAAGGTTGGTTGTTAGCAATA | |
| | TCACATACATGCATACTCAAGCAGACTTAAGATAGTCCttttttt | |
| | ttttttttttttttttGGTTTCTGATAATGGTGCAAAGTTTTCCT | |
| | GGTTGACATAATCTCTTTTCTTGGGGATCCTTTCTTCTATGTCTG | |
| | ATTATTGTTTATTTCACCTTTCCTTTTTATGAACCAGGCTTGTTG | |
| | ATCCGGTTGGCAATTTTTGTTCTCCTTCTTTTTAACTACAGCCAA | |
| | GTCTCCGTTGTCCAGGGTAATGGATAGCCTCATGCTTAATGAAGC | |
| | AGTAGTGGATAAGCAAAAATGAACCATTTGCGTTTCAAATTTTTA | |
| | AAAGTGCAAAATCACATAGAAATGTTTTCTGGTCACACCTTTGTG | |
| | AAGGATGGTGGGAGGGTGAGTTAGAAGCGCCTGAAGAATCAAGGT | |
| | GAGCCAGCAAAAGACACAGATTTACTGTAAGTGATTCTATGTGGA | |
| | TAACCCATGCAGGAATAATGGAGATGTGGCTGCAGTTCTCTCCTG | |
| | AATGCTTTGCTTTGTTTTAAAGTGTGAGATTCCCCCCtttttttt | |
| | GGAATGAATAATTGAATGATTTTATTTTAGAACTTAAACAACTTT | |
| | GCTCCGGTTAAGTTGATGAAGAGATTATCTTGCCAAAGGAAGATG | |
| | GTAGACAGTTTTTCACTTCCTAATTCCCCAAATTTCTTTGCCAAT | |
| | ATTCACCAAATTTCAGTATTTTGGGTGTGACCTTAAAGATCTGTG | |
| | CATTTCTGTCTTCTCTCCCAATGTTTGGTTGAAATTCTTCTTGAC | |
| | ATCATTGTACATTTTCCTTGAATAAATGCATTTTAATATAAAATT | |
| | TTATGTCATGTTTGATATGAGAGttatatatttaaatacatttaa | |
| | ataaatGTTTACCATGAAAATGTATGAATTATATGTATGTTTCAC | |
| | CTAAAATCCTTTGTATTTTTCCAGTAATAAATGAGTTCCACTTTG | |
| | TGAAATGTTGATTTGTAACAACAGTGAGGACTCCAGTTCCTTAGG | |
| | CTGGGGTATTTTCTCTTCTTTTATGCCCTCTAGTTAAATGAGAAA | |
| | TGTAGAGAGATGGAACTTTGTTGTGTCTAATATGCAAGCCTATAA | |
| | TCTAATAAAATTTAATTTGAGACTTTTAAACTGAGATTGGTGACA | |
| | CTGACAAAATTATCTAATTAGAAGATCACCAAAACATATCTAATC | |
| | CAAGAAACTGACATTCAGTGTGACTGATTAAGGTTCTTAGGACAT | |
| | CTCCTGAGATATCTCTGATAACATATATACTTCTTGCTCTACCTG | |
| | GAACATGGATGAGCTTTAAGTGTATGCAATGCAAGTTCTACCCAT | |
| | TAGTTTCTAGCAGCCTTGAAGATAAGTATCAGACAGTTTAGTGTT | |
| | GCCAATAGAATCTTGGAAGCTATGTTTAGCCAGGATACATTTGGA | |
| | AAGCTTACTAGCCTTTCTGTACTGATCCTTTCTATGACAGCAAAC | |
| | CCATTGTAAAATTTTCCCTGTTCCTCCAGCAGATTAACCCATAAT | |
| | ATCTTTTAACAACTTTAGATTTTTTAAATTCCTTTTAATTTAAAC | |
| | CAAATCTGCTTAATAGAAAGTAAGCAGTTTTCATGAGGATTCTAA | |
| | CTTTTTTTCTTCCAGAACTTGAAGAATCCAGACAGAAATGCCCAC | |
| | CATGCTGGTATAAATTTGCTAATATGTGTTTGATTTGGGACTGTT | |
| | GTAAACCATGGTTAAAGGTGAAACACCTTGTCAACCTGGTTGTAA | |
| | TGGACCCATTTGTTGACCTGGCCATCACCATCTGCATTGTCTTAA | |
| | ATACACTCTTCATGGCTATGGAGCACTATCCCATGACGGAGCAGT | |
| | TCAGCAGTGTACTGTCTGTTGGAAACCTGCTTGGCAGCGGCgagg | |
| | gcagaggcagtctgctgacatgcggtgacgtggaagagaatcccg | |
| | gccctCTTAAGCAAAGGAAATCTGGCCGCTCTGCTGGGAAGTATG | |
| | ATGTGTATTTGATCTCCGGGatggaagacgccaaaaacataaaga | |
| | aaggcccggcgccattctatccgctggaagatggaaccgctggag | |
| | agcaactgcataaggctatgaagagatacgccctggttcctggaa | |
| | caattgcttttacagatgcacatatcgaggtggacatcacttacg | |
| | ctgagtacttcgaaatgtccgttcggttggcagaagctatgaaac | |
| | gatatgggctgaatacaaatcacagaatcgtcgtatgcagtgaaa | |
| | actctcttcaattctttatgccggtgttgggcgcgttatttatcg | |
| | gagttgcagttgcgcccgcgaacgacatttataatgaacgtgaat | |
| | tgctcaacagtatgggcatttcgcagcctaccgtggtgttcgttt | |
| | ccaaaaaggggttgcaaaaaattttgaacgtgcaaaaaaagctcc | |
| | caatcatccaaaaaattattatcatggattctaaaacggattacc | |
| | agggatttcagtcgatgtacacgttcgtcacatctcatctacctc | |
| | ccggttttaatgaatacgattttgtgccagagtccttcgataggg | |
| | acaagacaattgcactgatcatgaactcctctggatctactggtc | |
| | tgcctaaaggtgtcgctctgcctcatagaactgcctgcgtgagat | |
| | tctcgcatgccagagatcctatttttggcaatcaaatcattccgg | |
| | atactgcgattttaagtgttgttccattccatcacggttttggaa | |
| | tgtttactacactcggatatttgatatgtggatttcgagtcgtct | |
| | taatgtatagatttgaagaagagctgtttctgaggagccttcagg | |
| | attacaagattcaaagtgcgctgctggtgccaaccctattctcct | |
| | tcttcgccaaaagcactctgattgacaaatacgatttatctaatt | |
| | tacacgaaattgcttctggtggcgctcccctctctaaggaagtcg | |
| | gggaagcggttgccaagaggttccatctgccaggtatcaggcaag | |
| | gatatgggctcactgagactacatcagctattctgattacacccg | |
| | agggggatgataaaccgggcgcggtcggtaaagttgttccatttt | |
| | ttgaagcgaaggttgtggatctggataccgggaaaacgctgggcg | |
| | ttaatcaaagaggcgaactgtgtgtgagaggtcctatgattatgt | |
| | ccggttatgtaaacaatccggaagcgaccaacgccttgattgaca | |
| | aggatggatggctacattctggagacatagcttactgggacgaag | |
| | acgaacacttcttcatcgttgaccgcctgaagtctctgattaagt | |
| | acaaaggctatcaggtggctcccgctgaattggaatccatcttgc | |
| | tccaacaccccaacatcttcgacgcaggtgtcgcaggtcttcccg | |
| | acgatgacgccggtgaacttcccgccgccgttgttgttttggagc | |
| | acggaaagacgatgacggaaaaagagatcgtggattacgtcgcca | |
| | gtcaagtaacaaccgcgaaaaagttgcgcggaggagttgtgtttg | |
| | tggacgaagtaccgaaaggtcttaccggaaaactcgacgcaagaa | |
| | aaatcagagagatcctcataaaggccaagaagggcggaaagatcg | |
| | ccgtgtaattctagagtcggggggccggaattcagatctaccaga | |
| | catgataagatacattgatgagtttggacaaaccacaactagaat | |
| | gcagtgaaaaaaatgctttatttgtgaaatttgtgatgctattgc | |
| | tttatttGTAACCATTATAAGCTGCAATAAACAAGTT | |

TABLE 10A
Example Fragment Sequences in a Library of Constructs

| Fragment Name | SEQ ID NO: |
|---|---|
| 001_mu1a1_Scn2aF1Scr2_U1 | 365 |
| 002_mu1a1_Scr2_U1 | 366 |
| 003_mu1a1_Scn2aD12_U1 | 367 |
| 004_mu1a1_Scn2aB10_U1 | 368 |
| 005_hRNU1-1_Scn2aB10_hRNU1-1 | 369 |
| 006_hRNU1-1_Scn2aB10_hRNU1-2 | 370 |
| 007_hRNU1-1_Scn2aB10_hRNU1-3 | 371 |
| 008_hRNU1-1_Scn2aB10_hRNU2-1 | 372 |
| 009_hRNU1-1_Scn2aB10_hU3 | 373 |
| 010_hRNU1-1_Scn2aB10_hRNU4-1 | 374 |
| 011_hRNU1-1_Scn2aB10_hRNU5A-1 | 375 |
| 012_hRNU1-1_Scn2aB10_hRNU6-1 | 376 |
| 013_hRNU1-1_Scn2aB10_RNU7-1 | 377 |
| 014_hRNU1-1_Scn2aB10_hRNU11 | 378 |
| 015_hRNU1-1_Scn2aB10_hRNU12 | 379 |
| 016_hRNU1-1_Scn2aB10_hRN7SK | 380 |
| 017_hRNU1-1_Scn2aB10_mRnu1a1 | 381 |
| 018_hRNU1-1_Scn2aB10_mRnu1b1 | 382 |
| 019_hRNU1-1_Scn2aB10_mRnu1b6 | 383 |
| 020_hRNU1-1_Scn2aB10_mRnu2-10 | 384 |
| 021_hRNU1-1_Scn2aB10_mRnu3b1 | 385 |
| 022_hRNU1-1_Scn2aB10_mRnu5g | 386 |
| 023_hRNU1-1_Scn2aB10_mRnu6 | 387 |
| 024_hRNU1-1_Scn2aB10_mRnu7 | 388 |
| 025_hRNU1-1_Scn2aB10_mRnu11 | 389 |
| 026_hRNU1-1_Scn2aB10_mRnu12 | 390 |
| 027_hRNU1-1_Scn2aB10_mRn7sk | 391 |
| 028_hRNU1-2_Scn2aB10_hRNU1-1 | 392 |
| 029_hRNU1-2_Scn2aB10_hRNU1-2 | 393 |
| 030_hRNU1-2_Scn2aB10_hRNU1-3 | 394 |
| 031_hRNU1-2_Scn2aB10_hRNU2-1 | 395 |
| 032_hRNU1-2_Scn2aB10_hU3 | 396 |
| 033_hRNU1-2_Scn2aB10_hRNU4-1 | 397 |
| 034_hRNU1-2_Scn2aB10_hRNU5A-1 | 398 |
| 035_hRNU1-2_Scn2aB10_hRNU6-1 | 399 |
| 036_hRNU1-2_Scn2aB10_RNU7-1 | 400 |
| 037_hRNU1-2_Scn2aB10_hRNU11 | 401 |
| 038_hRNU1-2_Scn2aB10_hRNU12 | 402 |
| 039_hRNU1-2_Scn2aB10_hRN7SK | 403 |
| 040_hRNU1-2_Scn2aB10_mRnu1a1 | 404 |
| 041_hRNU1-2_Scn2aB10_mRnu1b1 | 405 |
| 042_hRNU1-2_Scn2aB10_mRnu1b6 | 406 |
| 043_hRNU1-2_Scn2aB10_mRnu2-10 | 407 |
| 044_hRNU1-2_Scn2aB10_mRnu3b1 | 408 |
| 045_hRNU1-2_Scn2aB10_mRnu5g | 409 |
| 046_hRNU1-2_Scn2aB10_mRnu6 | 410 |
| 047_hRNU1-2_Scn2aB10_mRnu7 | 411 |
| 048_hRNU1-2_Scn2aB10_mRnu11 | 412 |
| 049_hRNU1-2_Scn2aB10_mRnu12 | 413 |
| 050_hRNU1-2_Scn2aB10_mRn7sk | 414 |
| 051_hRNU1-3_Scn2aB10_hRNU1-1 | 415 |
| 052_hRNU1-3_Scn2aB10_hRNU1-2 | 416 |
| 053_hRNU1-3_Scn2aB10_hRNU1-3 | 417 |
| 054_hRNU1-3_Scn2aB10_hRNU2-1 | 418 |
| 055_hRNU1-3_Scn2aB10_hU3 | 419 |
| 056_hRNU1-3_Scn2aB10_hRNU4-1 | 420 |
| 057_hRNU1-3_Scn2aB10_hRNU5A-1 | 421 |
| 058_hRNU1-3_Scn2aB10_hRNU6-1 | 422 |
| 059_hRNU1-3_Scn2aB10_RNU7-1 | 423 |
| 060_hRNU1-3_Scn2aB10_hRNU11 | 424 |
| 061_hRNU1-3_Scn2aB10_hRNU12 | 425 |
| 062_hRNU1-3_Scn2aB10_hRN7SK | 426 |
| 063_hRNU1-3_Scn2aB10_mRnu1a1 | 427 |
| 064_hRNU1-3_Scn2aB10_mRnu1b1 | 428 |
| 065_hRNU1-3_Scn2aB10_mRnu1b6 | 429 |
| 066_hRNU1-3_Scn2aB10_mRnu2-10 | 430 |
| 067_hRNU1-3_Scn2aB10_mRnu3b1 | 431 |
| 068_hRNU1-3_Scn2aB10_mRnu5g | 432 |
| 069_hRNU1-3_Scn2aB10_mRnu6 | 433 |
| 070_hRNU1-3_Scn2aB10_mRnu7 | 434 |
| 071_hRNU1-3_Scn2aB10_mRnu11 | 435 |
| 072_hRNU1-3_Scn2aB10_mRnu12 | 436 |
| 073_hRNU1-3_Scn2aB10_mRn7sk | 437 |
| 074_hRNU2-1_Scn2aB10_hRNU1-1 | 438 |
| 075_hRNU2-1_Scn2aB10_hRNU1-2 | 439 |
| 076_hRNU2-1_Scn2aB10_hRNU1-3 | 440 |
| 077_hRNU2-1_Scn2aB10_hRNU2-1 | 441 |
| 078_hRNU2-1_Scn2aB10_hU3 | 442 |
| 079_hRNU2-1_Scn2aB10_hRNU4-1 | 443 |
| 080_hRNU2-1_Scn2aB10_hRNU5A-1 | 444 |
| 081_hRNU2-1_Scn2aB10_hRNU6-1 | 445 |
| 082_hRNU2-1_Scn2aB10_RNU7-1 | 446 |
| 083_hRNU2-1_Scn2aB10_hRNU11 | 447 |
| 084_hRNU2-1_Scn2aB10_hRNU12 | 448 |
| 085_hRNU2-1_Scn2aB10_hRN7SK | 449 |
| 086_hRNU2-1_Scn2aB10_mRnu1a1 | 450 |
| 087_hRNU2-1_Scn2aB10_mRnu1b1 | 451 |
| 088_hRNU2-1_Scn2aB10_mRnu1b6 | 452 |
| 089_hRNU2-1_Scn2aB10_mRnu2-10 | 453 |
| 090_hRNU2-1_Scn2aB10_mRnu3b1 | 454 |
| 091_hRNU2-1_Scn2aB10_mRnu5g | 455 |
| 092_hRNU2-1_Scn2aB10_mRnu6 | 456 |
| 093_hRNU2-1_Scn2aB10_mRnu7 | 457 |
| 094_hRNU2-1_Scn2aB10_mRnu11 | 458 |
| 095_hRNU2-1_Scn2aB10_mRnu12 | 459 |
| 096_hRNU2-1_Scn2aB10_mRn7sk | 460 |
| 097_mu1a1_Scn2aF1Scr2_U1 | 461 |
| 098_mu1a1_Scr2_U1 | 462 |
| 099_mu1a1_Scn2aD12_U1 | 463 |
| 100_mu1a1_Scn2aB10_U1 | 464 |
| 101_hU3_Scn2aB10_hRNU1-1 | 465 |
| 102_hU3_Scn2aB10_hRNU1-2 | 466 |
| 103_hU3_Scn2aB10_hRNU1-3 | 467 |
| 104_hU3_Scn2aB10_hRNU2-1 | 468 |
| 105_hU3_Scn2aB10_hU3 | 469 |
| 106_hU3_Scn2aB10_hRNU4-1 | 470 |
| 107_hU3_Scn2aB10_hRNU5A-1 | 471 |
| 108_hU3_Scn2aB10_hRNU6-1 | 472 |
| 109_hU3_Scn2aB10_RNU7-1 | 473 |
| 110_hU3_Scn2aB10_hRNU11 | 474 |
| 111_hU3_Scn2aB10_hRNU12 | 475 |
| 112_hU3_Scn2aB10_hRN7SK | 476 |
| 113_hU3_Scn2aB10_mRnu1a1 | 477 |
| 114_hU3_Scn2aB10_mRnu1b1 | 478 |
| 115_hU3_Scn2aB10_mRnu1b6 | 479 |
| 116_hU3_Scn2aB10_mRnu2-10 | 480 |
| 117_hU3_Scn2aB10_mRnu3b1 | 481 |
| 118_hU3_Scn2aB10_mRnu5g | 482 |
| 119_hU3_Scn2aB10_mRnu6 | 483 |
| 120_hU3_Scn2aB10_mRnu7 | 484 |
| 121_hU3_Scn2aB10_mRnu11 | 485 |
| 122_hU3_Scn2aB10_mRnu12 | 486 |
| 123_hU3_Scn2aB10_mRn7sk | 487 |
| 124_hRNU4-1_Scn2aB10_hRNU1-1 | 488 |
| 125_hRNU4-1_Scn2aB10_hRNU1-2 | 489 |
| 126_hRNU4-1_Scn2aB10_hRNU1-3 | 490 |
| 127_hRNU4-1_Scn2aB10_hRNU2-1 | 491 |
| 128_hRNU4-1_Scn2aB10_hU3 | 492 |
| 129_hRNU4-1_Scn2aB10_hRNU4-1 | 493 |
| 130_hRNU4-1_Scn2aB10_hRNU5A-1 | 494 |
| 131_hRNU4-1_Scn2aB10_hRNU6-1 | 495 |
| 132_hRNU4-1_Scn2aB10_RNU7-1 | 496 |
| 133_hRNU4-1_Scn2aB10_hRNU11 | 497 |
| 134_hRNU4-1_Scn2aB10_hRNU12 | 498 |
| 135_hRNU4-1_Scn2aB10_hRN7SK | 499 |
| 136_hRNU4-1_Scn2aB10_mRnu1a1 | 500 |
| 137_hRNU4-1_Scn2aB10_mRnu1b1 | 501 |
| 138_hRNU4-1_Scn2aB10_mRnu1b6 | 502 |
| 139_hRNU4-1_Scn2aB10_mRnu2-10 | 503 |
| 140_hRNU4-1_Scn2aB10_mRnu3b1 | 504 |
| 141_hRNU4-1_Scn2aB10_mRnu5g | 505 |
| 142_hRNU4-1_Scn2aB10_mRnu6 | 506 |
| 143_hRNU4-1_Scn2aB10_mRnu7 | 507 |
| 144_hRNU4-1_Scn2aB10_mRnu11 | 508 |
| 145_hRNU4-1_Scn2aB10_mRnu12 | 509 |
| 146_hRNU4-1_Scn2aB10_mRn7sk | 510 |
| 147_hRNU5A-1_Scn2aB10_hRNU1-1 | 511 |
| 148_hRNU5A-1_Scn2aB10_hRNU1-2 | 512 |
| 149_hRNU5A-1_Scn2aB10_hRNU1-3 | 513 |
| 150_hRNU5A-1_Scn2aB10_hRNU2-1 | 514 |
| 151_hRNU5A-1_Scn2aB10_hU3 | 515 |
| 152_hRNU5A-1_Scn2aB10_hRNU4-1 | 516 |
| 153_hRNU5A-1_Scn2aB10_hRNU5A-1 | 517 |
| 154_hRNU5A-1_Scn2aB10_hRNU6-1 | 518 |
| 155_hRNU5A-1_Scn2aB10_RNU7-1 | 519 |
| 156_hRNU5A-1_Scn2aB10_hRNU11 | 520 |
| 157_hRNU5A-1_Scn2aB10_hRNU12 | 521 |
| 158_hRNU5A-1_Scn2aB10_hRN7SK | 522 |
| 159_hRNU5A-1_Scn2aB10_mRnu1a1 | 523 |
| 160_hRNU5A-1_Scn2aB10_mRnu1b1 | 524 |
| 161_hRNU5A-1_Scn2aB10_mRnu1b6 | 525 |
| 162_hRNU5A-1_Scn2aB10_mRnu2-10 | 526 |
| 163_hRNU5A-1_Scn2aB10_mRnu3b1 | 527 |
| 164_hRNU5A-1_Scn2aB10_mRnu5g | 528 |
| 165_hRNU5A-1_Scn2aB10_mRnu6 | 529 |
| 166_hRNU5A-1_Scn2aB10_mRnu7 | 530 |
| 167_hRNU5A-1_Scn2aB10_mRnu11 | 531 |
| 168_hRNU5A-1_Scn2aB10_mRnu12 | 532 |
| 169_hRNU5A-1_Scn2aB10_mRn7sk | 533 |
| 170_hRNU6-1_Scn2aB10_hRNU1-1 | 534 |
| 171_hRNU6-1_Scn2aB10_hRNU1-2 | 535 |
| 172_hRNU6-1_Scn2aB10_hRNU1-3 | 536 |
| 173_hRNU6-1_Scn2aB10_hRNU2-1 | 537 |
| 174_hRNU6-1_Scn2aB10_hU3 | 538 |
| 175_hRNU6-1_Scn2aB10_hRNU4-1 | 539 |
| 176_hRNU6-1_Scn2aB10_hRNU5A-1 | 540 |
| 177_hRNU6-1_Scn2aB10_hRNU6-1 | 541 |
| 178_hRNU6-1_Scn2aB10_RNU7-1 | 542 |
| 179_hRNU6-1_Scn2aB10_hRNU11 | 543 |
| 180_hRNU6-1_Scn2aB10_hRNU12 | 544 |
| 181_hRNU6-1_Scn2aB10_hRN7SK | 545 |
| 182_hRNU6-1_Scn2aB10_mRnu1a1 | 546 |
| 183_hRNU6-1_Scn2aB10_mRnu1b1 | 547 |
| 184_hRNU6-1_Scn2aB10_mRnu1b6 | 548 |
| 185_hRNU6-1_Scn2aB10_mRnu2-10 | 549 |
| 186_hRNU6-1_Scn2aB10_mRnu3b1 | 550 |
| 187_hRNU6-1_Scn2aB10_mRnu5g | 551 |
| 188_hRNU6-1_Scn2aB10_mRnu6 | 552 |
| 189_hRNU6-1_Scn2aB10_mRnu7 | 553 |
| 190_hRNU6-1_Scn2aB10_mRnu11 | 554 |
| 191_hRNU6-1_Scn2aB10_mRnu12 | 555 |
| 192_hRNU6-1_Scn2aB10_mRn7sk | 556 |
| 193_mu1a1_Scn2aF1Scr2_U1 | 557 |
| 194_mu1a1_Scr2_U1 | 558 |
| 195_mu1a1_Scn2aD12_U1 | 559 |
| 196_mu1a1_Scn2aB10_U1 | 560 |
| 197_RNU7-1_Scn2aB10_hRNU1-1 | 561 |
| 198_RNU7-1_Scn2aB10_hRNU1-2 | 562 |
| 199_RNU7-1_Scn2aB10_hRNU1-3 | 563 |
| 200_RNU7-1_Scn2aB10_hRNU2-1 | 564 |
| 201_RNU7-1_Scn2aB10_hU3 | 565 |
| 202_RNU7-1_Scn2aB10_hRNU4-1 | 566 |
| 203_RNU7-1_Scn2aB10_hRNU5A-1 | 567 |
| 204_RNU7-1_Scn2aB10_hRNU6-1 | 568 |
| 205_RNU7-1_Scn2aB10_RNU7-1 | 569 |
| 206_RNU7-1_Scn2aB10_hRNU11 | 570 |
| 207_RNU7-1_Scn2aB10_hRNU12 | 571 |
| 208_RNU7-1_Scn2aB10_hRN7SK | 572 |
| 209_RNU7-1_Scn2aB10_mRnu1a1 | 573 |
| 210_RNU7-1_Scn2aB10_mRnu1b1 | 574 |
| 211_RNU7-1_Scn2aB10_mRnu1b6 | 575 |
| 212_RNU7-1_Scn2aB10_mRnu2-10 | 576 |
| 213_RNU7-1_Scn2aB10_mRnu3b1 | 577 |
| 214_RNU7-1_Scn2aB10_mRnu5g | 578 |
| 215_RNU7-1_Scn2aB10_mRnu6 | 579 |
| 216_RNU7-1_Scn2aB10_mRnu7 | 580 |
| 217_RNU7-1_Scn2aB10_mRnu11 | 581 |
| 218_RNU7-1_Scn2aB10_mRnu12 | 582 |
| 219_RNU7-1_Scn2aB10_mRn7sk | 583 |
| 220_hRNU11_Scn2aB10_hRNU1-1 | 584 |
| 221_hRNU11_Scn2aB10_hRNU1-2 | 585 |
| 222_hRNU11_Scn2aB10_hRNU1-3 | 586 |
| 223_hRNU11_Scn2aB10_hRNU2-1 | 587 |
| 224_hRNU11_Scn2aB10_hU3 | 588 |
| 225_hRNU11_Scn2aB10_hRNU4-1 | 589 |
| 226_hRNU11_Scn2aB10_hRNU5A-1 | 590 |
| 227_hRNU11_Scn2aB10_hRNU6-1 | 591 |
| 228_hRNU11_Scn2aB10_RNU7-1 | 592 |
| 229_hRNU11_Scn2aB10_hRNU11 | 593 |
| 230_hRNU11_Scn2aB10_hRNU12 | 594 |
| 231_hRNU11_Scn2aB10_hRN7SK | 595 |
| 232_hRNU11_Scn2aB10_mRnu1a1 | 596 |
| 233_hRNU11_Scn2aB10_mRnu1b1 | 597 |
| 234_hRNU11_Scn2aB10_mRnu1b6 | 598 |
| 235_hRNU11_Scn2aB10_mRnu2-10 | 599 |
| 236_hRNU11_Scn2aB10_mRnu3b1 | 600 |
| 237_hRNU11_Scn2aB10_mRnu5g | 601 |
| 238_hRNU11_Scn2aB10_mRnu6 | 602 |
| 239_hRNU11_Scn2aB10_mRnu7 | 603 |
| 240_hRNU11_Scn2aB10_mRnu11 | 604 |
| 241_hRNU11_Scn2aB10_mRnu12 | 605 |
| 242_hRNU11_Scn2aB10_mRn7sk | 606 |
| 243_hRNU12_Scn2aB10_hRNU1-1 | 607 |
| 244_hRNU12_Scn2aB10_hRNU1-2 | 608 |
| 245_hRNU12_Scn2aB10_hRNU1-3 | 609 |
| 246_hRNU12_Scn2aB10_hRNU2-1 | 610 |
| 247_hRNU12_Scn2aB10_hU3 | 611 |
| 248_hRNU12_Scn2aB10_hRNU4-1 | 612 |
| 249_hRNU12_Scn2aB10_hRNU5A-1 | 613 |
| 250_hRNU12_Scn2aB10_hRNU6-1 | 614 |
| 251_hRNU12_Scn2aB10_RNU7-1 | 615 |
| 252_hRNU12_Scn2aB10_hRNU11 | 616 |
| 253_hRNU12_Scn2aB10_hRNU12 | 617 |
| 254_hRNU12_Scn2aB10_hRN7SK | 618 |
| 255_hRNU12_Scn2aB10_mRnu1a1 | 619 |
| 256_hRNU12_Scn2aB10_mRnu1b1 | 620 |
| 257_hRNU12_Scn2aB10_mRnu1b6 | 621 |
| 258_hRNU12_Scn2aB10_mRnu2-10 | 622 |
| 259_hRNU12_Scn2aB10_mRnu3b1 | 623 |
| 260_hRNU12_Scn2aB10_mRnu5g | 624 |
| 261_hRNU12_Scn2aB10_mRnu6 | 625 |
| 262_hRNU12_Scn2aB10_mRnu7 | 626 |
| 263_hRNU12_Scn2aB10_mRnu11 | 627 |
| 264_hRNU12_Scn2aB10_mRnu12 | 628 |
| 265_hRNU12_Scn2aB10_mRn7sk | 629 |
| 266_hRN7SK_Scn2aB10_hRNU1-1 | 630 |
| 267_hRN7SK_Scn2aB10_hRNU1-2 | 631 |
| 268_hRN7SK_Scn2aB10_hRNU1-3 | 632 |
| 269_hRN7SK_Scn2aB10_hRNU2-1 | 633 |
| 270_hRN7SK_Scn2aB10_hU3 | 634 |
| 271_hRN7SK_Scn2aB10_hRNU4-1 | 635 |
| 272_hRN7SK_Scn2aB10_hRNU5A-1 | 636 |
| 273_hRN7SK_Scn2aB10_hRNU6-1 | 637 |
| 274_hRN7SK_Scn2aB10_RNU7-1 | 638 |
| 275_hRN7SK_Scn2aB10_hRNU11 | 639 |
| 276_hRN7SK_Scn2aB10_hRNU12 | 640 |
| 277_hRN7SK_Scn2aB10_hRN7SK | 641 |
| 278_hRN7SK_Scn2aB10_mRnu1a1 | 642 |
| 279_hRN7SK_Scn2aB10_mRnu1b1 | 643 |
| 280_hRN7SK_Scn2aB10_mRnu1b6 | 644 |
| 281_hRN7SK_Scn2aB10_mRnu2-10 | 645 |
| 282_hRN7SK_Scn2aB10_mRnu3b1 | 646 |
| 283_hRN7SK_Scn2aB10_mRnu5g | 647 |
| 284_hRN7SK_Scn2aB10_mRnu6 | 648 |
| 285_hRN7SK_Scn2aB10_mRnu7 | 649 |
| 286_hRN7SK_Scn2aB10_mRnu11 | 650 |
| 287_hRN7SK_Scn2aB10_mRnu12 | 651 |
| 288_hRN7SK_Scn2aB10_mRn7sk | 652 |
| 289_mu1a1_Scn2aF1Scr2_U1 | 653 |
| 290_mu1a1_Scr2_U1 | 654 |
| 291_mu1a1_Scn2aD12_U1 | 655 |
| 292_mu1a1_Scn2aB10_U1 | 656 |
| 293_mRnu1a1_Scn2aB10_hRNU1-1 | 657 |
| 294_mRnu1a1_Scn2aB10_hRNU1-2 | 658 |
| 295_mRnu1a1_Scn2aB10_hRNU1-3 | 659 |
| 296_mRnu1a1_Scn2aB10_hRNU2-1 | 660 |
| 297_mRnu1a1_Scn2aB10_hU3 | 661 |
| 298_mRnu1a1_Scn2aB10_hRNU4-1 | 662 |
| 299_mRnu1a1_Scn2aB10_hRNU5A-1 | 663 |
| 300_mRnu1a1_Scn2aB10_hRNU6-1 | 664 |
| 301_mRnu1a1_Scn2aB10_RNU7-1 | 665 |
| 302_mRnu1a1_Scn2aB10_hRNU11 | 666 |
| 303_mRnu1a1_Scn2aB10_hRNU12 | 667 |
| 304_mRnu1a1_Scn2aB10_hRN7SK | 668 |
| 305_mRnu1a1_Scn2aB10_mRnu1a1 | 669 |
| 306_mRnu1a1_Scn2aB10_mRnu1b1 | 670 |
| 307_mRnu1a1_Scn2aB10_mRnu1b6 | 671 |
| 308_mRnu1a1_Scn2aB10_mRnu2-10 | 672 |
| 309_mRnu1a1_Scn2aB10_mRnu3b1 | 673 |
| 310_mRnu1a1_Scn2aB10_mRnu5g | 674 |
| 311_mRnu1a1_Scn2aB10_mRnu6 | 675 |
| 312_mRnu1a1_Scn2aB10_mRnu7 | 676 |
| 313_mRnu1a1_Scn2aB10_mRnu11 | 677 |
| 314_mRnu1a1_Scn2aB10_mRnu12 | 678 |
| 315_mRnu1a1_Scn2aB10_mRn7sk | 679 |
| 316_mRnu1b1_Scn2aB10_hRNU1-1 | 680 |
| 317_mRnu1b1_Scn2aB10_hRNU1-2 | 681 |
| 318_mRnu1b1_Scn2aB10_hRNU1-3 | 682 |
| 319_mRnu1b1_Scn2aB10_hRNU2-1 | 683 |
| 320_mRnu1b1_Scn2aB10_hU3 | 684 |
| 321_mRnu1b1_Scn2aB10_hRNU4-1 | 685 |
| 322_mRnu1b1_Scn2aB10_hRNU5A-1 | 686 |
| 323_mRnu1b1_Scn2aB10_hRNU6-1 | 687 |
| 324_mRnu1b1_Scn2aB10_RNU7-1 | 688 |
| 325_mRnu1b1_Scn2aB10_hRNU11 | 689 |
| 326_mRnu1b1_Scn2aB10_hRNU12 | 690 |
| 327_mRnu1b1_Scn2aB10_hRN7SK | 691 |
| 328_mRnu1b1_Scn2aB10_mRnu1a1 | 692 |
| 329_mRnu1b1_Scn2aB10_mRnu1b1 | 693 |
| 330_mRnu1b1_Scn2aB10_mRnu1b6 | 694 |
| 331_mRnu1b1_Scn2aB10_mRnu2-10 | 695 |
| 332_mRnu1b1_Scn2aB10_mRnu3b1 | 696 |
| 333_mRnu1b1_Scn2aB10_mRnu5g | 697 |
| 334_mRnu1b1_Scn2aB10_mRnu6 | 698 |
| 335_mRnu1b1_Scn2aB10_mRnu7 | 699 |
| 336_mRnu1b1_Scn2aB10_mRnu11 | 700 |
| 337_mRnu1b1_Scn2aB10_mRnu12 | 701 |
| 338_mRnu1b1_Scn2aB10_mRn7sk | 702 |
| 339_mRnu1b6_Scn2aB10_hRNU1-1 | 703 |
| 340_mRnu1b6_Scn2aB10_hRNU1-2 | 704 |
| 341_mRnu1b6_Scn2aB10_hRNU1-3 | 705 |
| 342_mRnu1b6_Scn2aB10_hRNU2-1 | 706 |
| 343_mRnu1b6_Scn2aB10_hU3 | 707 |
| 344_mRnu1b6_Scn2aB10_hRNU4-1 | 708 |
| 345_mRnu1b6_Scn2aB10_hRNU5A-1 | 709 |
| 346_mRnu1b6_Scn2aB10_hRNU6-1 | 710 |
| 347_mRnu1b6_Scn2aB10_RNU7-1 | 711 |
| 348_mRnu1b6_Scn2aB10_hRNU11 | 712 |
| 349_mRnu1b6_Scn2aB10_hRNU12 | 713 |
| 350_mRnu1b6_Scn2aB10_hRN7SK | 714 |
| 351_mRnu1b6_Scn2aB10_mRnu1a1 | 715 |
| 352_mRnu1b6_Scn2aB10_mRnu1b1 | 716 |
| 353_mRnu1b6_Scn2aB10_mRnu1b6 | 717 |
| 354_mRnu1b6_Scn2aB10_mRnu2-10 | 718 |
| 355_mRnu1b6_Scn2aB10_mRnu3b1 | 719 |
| 356_mRnu1b6_Scn2aB10_mRnu5g | 720 |
| 357_mRnu1b6_Scn2aB10_mRnu6 | 721 |
| 358_mRnu1b6_Scn2aB10_mRnu7 | 722 |
| 359_mRnu1b6_Scn2aB10_mRnu11 | 723 |
| 360_mRnu1b6_Scn2aB10_mRnu12 | 724 |
| 361_mRnu1b6_Scn2aB10_mRn7sk | 725 |
| 362_mRnu2-10_Scn2aB10_hRNU1-1 | 726 |
| 363_mRnu2-10_Scn2aB10_hRNU1-2 | 727 |
| 364_mRnu2-10_Scn2aB10_hRNU1-3 | 728 |
| 365_mRnu2-10_Scn2aB10_hRNU2-1 | 729 |
| 366_mRnu2-10_Scn2aB10_hU3 | 730 |
| 367_mRnu2-10_Scn2aB10_hRNU4-1 | 731 |
| 368_mRnu2-10_Scn2aB10_hRNU5A-1 | 732 |
| 369_mRnu2-10_Scn2aB10_hRNU6-1 | 733 |
| 370_mRnu2-10_Scn2aB10_RNU7-1 | 734 |
| 371_mRnu2-10_Scn2aB10_hRNU11 | 735 |
| 372_mRnu2-10_Scn2aB10_hRNU12 | 736 |
| 373_mRnu2-10_Scn2aB10_hRN7SK | 737 |
| 374_mRnu2-10_Scn2aB10_mRnu1a1 | 738 |
| 375_mRnu2-10_Scn2aB10_mRnu1b1 | 739 |
| 376_mRnu2-10_Scn2aB10_mRnu1b6 | 740 |
| 377_mRnu2-10_Scn2aB10_mRnu2-10 | 741 |
| 378_mRnu2-10_Scn2aB10_mRnu3b1 | 742 |
| 379_mRnu2-10_Scn2aB10_mRnu5g | 743 |
| 380_mRnu2-10_Scn2aB10_mRnu6 | 744 |
| 381_mRnu2-10_Scn2aB10_mRnu7 | 745 |
| 382_mRnu2-10_Scn2aB10_mRnu11 | 746 |
| 383_mRnu2-10_Scn2aB10_mRnu12 | 747 |
| 384_mRnu2-10_Scn2aB10_mRn7sk | 748 |
| 385_mu1a1_Scn2aF1Scr2_U1 | 749 |
| 386_mu1a1_Scr2_U1 | 750 |
| 387_mu1a1_Scn2aD12_U1 | 751 |
| 388_mu1a1_Scn2aB10_U1 | 752 |
| 389_mRnu3b1_Scn2aB10_hRNU1-1 | 753 |
| 390_mRnu3b1_Scn2aB10_hRNU1-2 | 754 |
| 391_mRnu3b1_Scn2aB10_hRNU1-3 | 755 |
| 392_mRnu3b1_Scn2aB10_hRNU2-1 | 756 |
| 393_mRnu3b1_Scn2aB10_hU3 | 757 |
| 394_mRnu3b1_Scn2aB10_hRNU4-1 | 758 |
| 395_mRnu3b1_Scn2aB10_hRNU5A-1 | 759 |
| 396_mRnu3b1_Scn2aB10_hRNU6-1 | 760 |
| 397_mRnu3b1_Scn2aB10_RNU7-1 | 761 |
| 398_mRnu3b1_Scn2aB10_hRNU11 | 762 |
| 399_mRnu3b1_Scn2aB10_hRNU12 | 763 |
| 400_mRnu3b1_Scn2aB10_hRN7SK | 764 |
| 401_mRnu3b1_Scn2aB10_mRnu1a1 | 765 |
| 402_mRnu3b1_Scn2aB10_mRnu1b1 | 766 |
| 403_mRnu3b1_Scn2aB10_mRnu1b6 | 767 |
| 404_mRnu3b1_Scn2aB10_mRnu2-10 | 768 |
| 405_mRnu3b1_Scn2aB10_mRnu3b1 | 769 |
| 406_mRnu3b1_Scn2aB10_mRnu5g | 770 |
| 407_mRnu3b1_Scn2aB10_mRnu6 | 771 |
| 408_mRnu3b1_Scn2aB10_mRnu7 | 772 |
| 409_mRnu3b1_Scn2aB10_mRnu11 | 773 |
| 410_mRnu3b1_Scn2aB10_mRnu12 | 774 |
| 411_mRnu3b1_Scn2aB10_mRn7sk | 775 |
| 412_mRnu5g_Scn2aB10_hRNU1-1 | 776 |
| 413_mRnu5g_Scn2aB10_hRNU1-2 | 777 |
| 414_mRnu5g_Scn2aB10_hRNU1-3 | 778 |
| 415_mRnu5g_Scn2aB10_hRNU2-1 | 779 |
| 416_mRnu5g_Scn2aB10_hU3 | 780 |
| 417_mRnu5g_Scn2aB10_hRNU4-1 | 781 |
| 418_mRnu5g_Scn2aB10_hRNU5A-1 | 782 |
| 419_mRnu5g_Scn2aB10_hRNU6-1 | 783 |
| 420_mRnu5g_Scn2aB10_RNU7-1 | 784 |
| 421_mRnu5g_Scn2aB10_hRNU11 | 785 |
| 422_mRnu5g_Scn2aB10_hRNU12 | 786 |
| 423_mRnu5g_Scn2aB10_hRN7SK | 787 |
| 424_mRnu5g_Scn2aB10_mRnu1a1 | 788 |
| 425_mRnu5g_Scn2aB10_mRnu1b1 | 789 |
| 426_mRnu5g_Scn2aB10_mRnu1b6 | 790 |
| 427_mRnu5g_Scn2aB10_mRnu2-10 | 791 |
| 428_mRnu5g_Scn2aB10_mRnu3b1 | 792 |
| 429_mRnu5g_Scn2aB10_mRnu5g | 793 |
| 430_mRnu5g_Scn2aB10_mRnu6 | 794 |
| 431_mRnu5g_Scn2aB10_mRnu7 | 795 |
| 432_mRnu5g_Scn2aB10_mRnu11 | 796 |
| 433_mRnu5g_Scn2aB10_mRnu12 | 797 |
| 434_mRnu5g_Scn2aB10_mRn7sk | 798 |
| 435_mRnu6_Scn2aB10_hRNU1-1 | 799 |
| 436_mRnu6_Scn2aB10_hRNU1-2 | 800 |
| 437_mRnu6_Scn2aB10_hRNU1-3 | 801 |
| 438_mRnu6_Scn2aB10_hRNU2-1 | 802 |
| 439_mRnu6_Scn2aB10_hU3 | 803 |
| 440_mRnu6_Scn2aB10_hRNU4-1 | 804 |
| 441_mRnu6_Scn2aB10_hRNU5A-1 | 805 |
| 442_mRnu6_Scn2aB10_hRNU6-1 | 806 |
| 443_mRnu6_Scn2aB10_RNU7-1 | 807 |
| 444_mRnu6_Scn2aB10_hRNU11 | 808 |
| 445_mRnu6_Scn2aB10_hRNU12 | 809 |
| 446_mRnu6_Scn2aB10_hRN7SK | 810 |
| 447_mRnu6_Scn2aB10_mRnu1a1 | 811 |
| 448_mRnu6_Scn2aB10_mRnu1b1 | 812 |
| 449_mRnu6_Scn2aB10_mRnu1b6 | 813 |
| 450_mRnu6_Scn2aB10_mRnu2-10 | 814 |
| 451_mRnu6_Scn2aB10_mRnu3b1 | 815 |
| 452_mRnu6_Scn2aB10_mRnu5g | 816 |
| 453_mRnu6_Scn2aB10_mRnu6 | 817 |
| 454_mRnu6_Scn2aB10_mRnu7 | 818 |
| 455_mRnu6_Scn2aB10_mRnu11 | 819 |
| 456_mRnu6_Scn2aB10_mRnu12 | 820 |
| 457_mRnu6_Scn2aB10_mRn7sk | 821 |
| 458_mRnu7_Scn2aB10_hRNU1-1 | 822 |
| 459_mRnu7_Scn2aB10_hRNU1-2 | 823 |
| 460_mRnu7_Scn2aB10_hRNU1-3 | 824 |
| 461_mRnu7_Scn2aB10_hRNU2-1 | 825 |
| 462_mRnu7_Scn2aB10_hU3 | 826 |
| 463_mRnu7_Scn2aB10_hRNU4-1 | 827 |
| 464_mRnu7_Scn2aB10_hRNU5A-1 | 828 |
| 465_mRnu7_Scn2aB10_hRNU6-1 | 829 |
| 466_mRnu7_Scn2aB10_RNU7-1 | 830 |
| 467_mRnu7_Scn2aB10_hRNU11 | 831 |
| 468_mRnu7_Scn2aB10_hRNU12 | 832 |
| 469_mRnu7_Scn2aB10_hRN7SK | 833 |
| 470_mRnu7_Scn2aB10_mRnu1a1 | 834 |
| 471_mRnu7_Scn2aB10_mRnu1b1 | 835 |
| 472_mRnu7_Scn2aB10_mRnu1b6 | 836 |
| 473_mRnu7_Scn2aB10_mRnu2-10 | 837 |
| 474_mRnu7_Scn2aB10_mRnu3b1 | 838 |
| 475_mRnu7_Scn2aB10_mRnu5g | 839 |
| 476_mRnu7_Scn2aB10_mRnu6 | 840 |
| 477_mRnu7_Scn2aB10_mRnu7 | 841 |
| 478_mRnu7_Scn2aB10_mRnu11 | 842 |
| 479_mRnu7_Scn2aB10_mRnu12 | 843 |
| 480_mRnu7_Scn2aB10_mRn7sk | 844 |
| 481_mu1a1_Scn2aF1Scr2_U1 | 845 |
| 482_mu1a1_Scr2_U1 | 846 |
| 483_mu1a1_Scn2aD12_U1 | 847 |
| 484_mu1a1_Scn2aB10_U1 | 848 |
| 485_mRnu11_Scn2aB10_hRNU1-1 | 849 |
| 486_mRnu11_Scn2aB10_hRNU1-2 | 850 |
| 487_mRnu11_Scn2aB10_hRNU1-3 | 851 |
| 488_mRnu11_Scn2aB10_hRNU2-1 | 852 |
| 489_mRnu11_Scn2aB10_hU3 | 853 |
| 490_mRnu11_Scn2aB10_hRNU4-1 | 854 |
| 491_mRnu11_Scn2aB10_hRNU5A-1 | 855 |
| 492_mRnu11_Scn2aB10_hRNU6-1 | 856 |
| 493_mRnu11_Scn2aB10_RNU7-1 | 857 |
| 494_mRnu11_Scn2aB10_hRNU11 | 858 |
| 495_mRnu11_Scn2aB10_hRNU12 | 859 |
| 496_mRnu11_Scn2aB10_hRN7SK | 860 |
| 497_mRnu11_Scn2aB10_mRnu1a1 | 861 |
| 498_mRnu11_Scn2aB10_mRnu1b1 | 862 |
| 499_mRnu11_Scn2aB10_mRnu1b6 | 863 |
| 500_mRnu11_Scn2aB10_mRnu2-10 | 864 |
| 501_mRnu11_Scn2aB10_mRnu3b1 | 865 |
| 502_mRnu11_Scn2aB10_mRnu5g | 866 |
| 503_mRnu11_Scn2aB10_mRnu6 | 867 |
| 504_mRnu11_Scn2aB10_mRnu7 | 868 |
| 505_mRnu11_Scn2aB10_mRnu11 | 869 |
| 506_mRnu11_Scn2aB10_mRnu12 | 870 |
| 507_mRnu11_Scn2aB10_mRn7sk | 871 |
| 508_mRnu12_Scn2aB10_hRNU1-1 | 872 |
| 509_mRnu12_Scn2aB10_hRNU1-2 | 873 |
| 510_mRnu12_Scn2aB10_hRNU1-3 | 874 |
| 511_mRnu12_Scn2aB10_hRNU2-1 | 875 |
| 512_mRnu12_Scn2aB10_hU3 | 876 |
| 513_mRnu12_Scn2aB10_hRNU4-1 | 877 |
| 514_mRnu12_Scn2aB10_hRNU5A-1 | 878 |
| 515_mRnu12_Scn2aB10_hRNU6-1 | 879 |
| 516_mRnu12_Scn2aB10_RNU7-1 | 880 |
| 517_mRnu12_Scn2aB10_hRNU11 | 881 |
| 518_mRnu12_Scn2aB10_hRNU12 | 882 |
| 519_mRnu12_Scn2aB10_hRN7SK | 883 |
| 520_mRnu12_Scn2aB10_mRnu1a1 | 884 |
| 521_mRnu12_Scn2aB10_mRnu1b1 | 885 |
| 522_mRnu12_Scn2aB10_mRnu1b6 | 886 |
| 523_mRnu12_Scn2aB10_mRnu2-10 | 887 |
| 524_mRnu12_Scn2aB10_mRnu3b1 | 888 |
| 525_mRnu12_Scn2aB10_mRnu5g | 889 |
| 526_mRnu12_Scn2aB10_mRnu6 | 890 |
| 527_mRnu12_Scn2aB10_mRnu7 | 891 |
| 528_mRnu12_Scn2aB10_mRnu11 | 892 |
| 529_mRnu12_Scn2aB10_mRnu12 | 893 |
| 530_mRnu12_Scn2aB10_mRn7sk | 894 |
| 531_mRn7sk_Scn2aB10_hRNU1-1 | 895 |
| 532_mRn7sk_Scn2aB10_hRNU1-2 | 896 |
| 533_mRn7sk_Scn2aB10_hRNU1-3 | 897 |
| 534_mRn7sk_Scn2aB10_hRNU2-1 | 898 |
| 535_mRn7sk_Scn2aB10_hU3 | 899 |
| 536_mRn7sk_Scn2aB10_hRNU4-1 | 900 |
| 537_mRn7sk_Scn2aB10_hRNU5A-1 | 901 |
| 538_mRn7sk_Scn2aB10_hRNU6-1 | 902 |
| 539_mRn7sk_Scn2aB10_RNU7-1 | 903 |
| 540_mRn7sk_Scn2aB10_hRNU11 | 904 |
| 541_mRn7sk_Scn2aB10_hRNU12 | 905 |
| 542_mRn7sk_Scn2aB10_hRN7SK | 906 |
| 543_mRn7sk_Scn2aB10_mRnu1a1 | 907 |
| 544_mRn7sk_Scn2aB10_mRnu1b1 | 908 |
| 545_mRn7sk_Scn2aB10_mRnu1b6 | 909 |
| 546_mRn7sk_Scn2aB10_mRnu2-10 | 910 |
| 547_mRn7sk_Scn2aB10_mRnu3b1 | 911 |
| 548_mRn7sk_Scn2aB10_mRnu5g | 912 |
| 549_mRn7sk_Scn2aB10_mRnu6 | 913 |
| 550_mRn7sk_Scn2aB10_mRnu7 | 914 |
| 551_mRn7sk_Scn2aB10_mRnu11 | 915 |
| 552_mRn7sk_Scn2aB10_mRnu12 | 916 |
| 553_mRn7sk_Scn2aB10_mRn7sk | 917 |

TABLE 10B
Example U7 Core Sequences included
in a library of constructs

| U7 Core | | SEQ ID |
|---|---|---|
| Name | U7 Core Sequence | NO: |
| Scn2aF1Scr2 | aATGATAGGGACTTAGGGTGAGAAA | 919 |
| | TATTCCTCTAACATTCTACAAATT | |
| | TTTGGAGcaggttttctgacttcg | |
| | gtcggaaaacccct | |
| Scr2 | aATGATAGGGACTTAGGGTGAGAT | 920 |
| | AATGGTCACAGGCGGAAGGGATCG | |
| | AATCAGAGTCATGCGGAGGTGTAA | |
| | ATTTTTGGAGcaggttttctgact | |
| | tcggtoggaaaacccct | |
| Scn2aD12 | aATGATAGGGACTTAGGGTGAACA | 921 |
| | TTACTTTGAACTTAACACTACTAG | |
| | AAGAATTTTTGGAGcaggttttct | |
| | gacttcggtoggaaaacccct | |
| Scn2aB10 | aATGATAGGGACTTAGGGTGATAG | 922 |
| | AAGTGCAAAGCATGACTGTCAAAT | |
| | TTTTGGAGcaggttttctgacttc | |
| | ggtcggaaaacccct | |

TABLE 11
Library 1 Summary

| | | | | | | | | | | ANOVA |
|---|---|---|---|---|---|---|---|---|---|---|
| Name | ID | Promoter | U7 | Terminator | Rep1 | Rep2 | Rep3 | Average | SD | P-value |
| 054_hRNU1-3_Scn2aB10_hRNU2-1 | 054 | hRNU1-3 | Scn2aB10 | hRNU2-1 | 0.64 | 0.43 | 0.25 | 0.44 | 0.19 | 0.007 |
| 043_hRNU1-2_Scn2aB10_mRnu2-10 | 043 | hRNU1-2 | Scn2aB10 | mRnu2-10 | 0.72 | 0.76 | 0.83 | 0.77 | 0.06 | 0.25 |
| 033_hRNU1-2_Scn2aB10_hRNU4-1 | 033 | hRNU1-2 | Scn2aB10 | hRNU4-1 | 0.53 | 0.90 | 1.03 | 0.82 | 0.26 | 0.35 |
| 073_hRNU1-3_Scn2aB10_mRn7sk | 073 | hRNU1-3 | Scn2aB10 | mRn7sk | 0.88 | 0.88 | 0.86 | 0.87 | 0.01 | 0.50 |
| 044_hRNU1-2_Scn2aB10_mRnu3b1 | 044 | hRNU1-2 | Scn2aB10 | mRnu3b1 | 0.88 | 0.92 | 0.91 | 0.90 | 0.02 | 0.59 |
| 097_mu1a1_Scn2aF1Scr2_U1 | 097 | mu1a1 | Scn2aF1Scr2 | U1 | 0.93 | 1.07 | 0.80 | 0.93 | 0.14 | 0.69 |
| 048_hRNU1-2_Scn2aB10_mRnu11 | 048 | hRNU1-2 | Scn2aB10 | mRnu11 | 0.82 | 1.03 | 1.07 | 0.97 | 0.13 | 0.84 |
| 002_mu1a1_Scr2_U1 | 002 | mu1a1 | Scr2 | U1 | 1.15 | 0.81 | 0.96 | 0.97 | 0.17 | 0.84 |
| 039_hRNU1-2_Scn2aB10_hRN7SK | 039 | hRNU1-2 | Scn2aB10 | hRN7SK | 1.31 | 1.10 | 0.59 | 1.00 | 0.37 | 0.94 |
| 098_mu1a1_Scr2_U1 | 098 | mu1a1 | Scr2 | U1 | 1.10 | 1.02 | 0.93 | 1.02 | 0.09 | Control |
| 050_hRNU1-2_Scn2aB10_mRn7sk | 050 | hRNU1-2 | Scn2aB10 | mRn7sk | 1.16 | 1.13 | 0.86 | 1.05 | 0.17 | 0.88 |
| 021_hRNU1-1_Scn2aB10_mRnu3b1 | 021 | hRNU1-1 | Scn2aB10 | mRnu3b1 | 0.97 | 1.08 | 1.10 | 1.05 | 0.07 | 0.88 |
| 090_hRNU2-1_Scn2aB10_mRnu3b1 | 090 | hRNU2-1 | Scn2aB10 | mRnu3b1 | 1.08 | 0.82 | 1.26 | 1.05 | 0.23 | 0.86 |
| 085_hRNU2-1_Scn2aB10_hRN7SK | 085 | hRNU2-1 | Scn2aB10 | hRN7SK | 1.03 | 0.84 | 1.34 | 1.07 | 0.25 | 0.80 |
| 016_hRNU1-1_Scn2aB10_hRN7SK | 016 | hRNU1-1 | Scn2aB10 | hRN7SK | 0.82 | 1.00 | 1.39 | 1.07 | 0.29 | 0.80 |
| 001_mu1a1_Scn2aF1Scr2_U1 | 001 | mu1a1 | Scn2aF1Scr2 | U1 | 0.82 | 1.10 | 1.32 | 1.08 | 0.25 | 0.77 |
| 027_hRNU1-1_Scn2aB10_mRn7sk | 027 | hRNU1-1 | Scn2aB10 | mRn7sk | 1.17 | 1.19 | 0.88 | 1.08 | 0.18 | 0.77 |
| 071_hRNU1-3_Scn2aB10_mRnu11 | 071 | hRNU1-3 | Scn2aB10 | mRnu11 | 1.65 | 0.92 | 0.67 | 1.08 | 0.51 | 0.77 |
| 036_hRNU1-2_Scn2aB10_RNU7-1 | 036 | hRNU1-2 | Scn2aB10 | RNU7-1 | 0.99 | 0.90 | 1.37 | 1.09 | 0.25 | 0.74 |
| 031_hRNU1-2_Scn2aB10_hRNU2-1 | 031 | hRNU1-2 | Scn2aB10 | hRNU2-1 | 1.19 | 1.06 | 1.06 | 1.11 | 0.08 | 0.68 |
| 062_hRNU1-3_Scn2aB10_hRN7SK | 062 | hRNU1-3 | Scn2aB10 | hRN7SK | 0.89 | 1.49 | 1.05 | 1.14 | 0.31 | 0.55 |
| 086_hRNU2-1_Scn2aB10_mRnu1a1 | 086 | hRNU2-1 | Scn2aB10 | mRnu1a1 | 1.05 | 0.79 | 1.64 | 1.16 | 0.44 | 0.50 |
| 052_hRNU1-3_Scn2aB10_hRNU1-2 | 052 | hRNU1-3 | Scn2aB10 | hRNU1-2 | 1.34 | 1.32 | 0.84 | 1.16 | 0.28 | 0.48 |
| 053_hRNU1-3_Scn2aB10_hRNU1-3 | 053 | hRNU1-3 | Scn2aB10 | hRNU1-3 | 0.67 | 1.88 | 0.96 | 1.17 | 0.63 | 0.47 |
| 067_hRNU1-3_Scn2aB10_mRnu3b1 | 067 | hRNU1-3 | Scn2aB10 | mRnu3b1 | 1.26 | 1.18 | 1.09 | 1.18 | 0.09 | 0.45 |
| 042_hRNU1-2_Scn2aB10_mRnu1b6 | 042 | hRNU1-2 | Scn2aB10 | mRnu1b6 | 1.07 | 1.19 | 1.33 | 1.20 | 0.13 | 0.40 |
| 059_hRNU1-3_Scn2aB10_RNU7-1 | 059 | hRNU1-3 | Scn2aB10 | RNU7-1 | 1.40 | 1.10 | 1.13 | 1.21 | 0.16 | 0.36 |
| 063_hRNU1-3_Scn2aB10_mRnu1a1 | 063 | hRNU1-3 | Scn2aB10 | mRnu1a1 | 1.43 | 1.20 | 1.01 | 1.21 | 0.21 | 0.35 |
| 072_hRNU1-3_Scn2aB10_mRnu12 | 072 | hRNU1-3 | Scn2aB10 | mRnu12 | 1.01 | 1.18 | 1.47 | 1.22 | 0.23 | 0.34 |
| 005_hRNU1-1_Scn2aB10_hRNU1-1 | 005 | hRNU1-1 | Scn2aB10 | hRNU1-1 | 1.39 | 1.04 | 1.25 | 1.23 | 0.18 | 0.32 |
| 081_hRNU2-1_Scn2aB10_hRNU6-1 | 081 | hRNU2-1 | Scn2aB10 | hRNU6-1 | 1.55 | 1.13 | 1.02 | 1.23 | 0.28 | 0.31 |
| 060_hRNU1-3_Scn2aB10_hRNU11 | 060 | hRNU1-3 | Scn2aB10 | hRNU11 | 1.21 | 1.23 | 1.26 | 1.23 | 0.03 | 0.31 |
| 013_hRNU1-1_Scn2aB10_RNU7-1 | 013 | hRNU1-1 | Scn2aB10 | RNU7-1 | 1.28 | 1.13 | 1.31 | 1.24 | 0.10 | 0.29 |
| 008_hRNU1-1_Scn2aB10_hRNU2-1 | 008 | hRNU1-1 | Scn2aB10 | hRNU2-1 | 1.26 | 0.84 | 1.62 | 1.24 | 0.39 | 0.29 |
| 014_hRNU1-1_Scn2aB10_hRNU11 | 014 | hRNU1-1 | Scn2aB10 | hRNU11 | 1.25 | 1.34 | 1.13 | 1.24 | 0.11 | 0.29 |
| 049_hRNU1-2_Scn2aB10_mRnu12 | 049 | hRNU1-2 | Scn2aB10 | mRnu12 | 1.27 | 1.26 | 1.19 | 1.24 | 0.04 | 0.29 |
| 032_hRNU1-2_Scn2aB10_hU3 | 032 | hRNU1-2 | Scn2aB10 | hU3 | 1.27 | 1.46 | 1.03 | 1.25 | 0.21 | 0.26 |
| 058_hRNU1-3_Scn2aB10_hRNU6-1 | 058 | hRNU1-3 | Scn2aB10 | hRNU6-1 | 1.41 | 1.06 | 1.31 | 1.26 | 0.18 | 0.25 |
| 051_hRNU1-3_Scn2aB10_hRNU1-1 | 051 | hRNU1-3 | Scn2aB10 | hRNU1-1 | 1.60 | 1.05 | 1.17 | 1.27 | 0.29 | 0.23 |
| 020_hRNU1-1_Scn2aB10_mRnu2-10 | 020 | hRNU1-1 | Scn2aB10 | mRnu2-10 | 1.27 | 1.39 | 1.15 | 1.27 | 0.12 | 0.23 |
| 064_hRNU1-3_Scn2aB10_mRnu1b1 | 064 | hRNU1-3 | Scn2aB10 | mRnu1b1 | 1.32 | 1.09 | 1.43 | 1.28 | 0.17 | 0.21 |
| 096_hRNU2-1_Scn2aB10_mRn7sk | 096 | hRNU2-1 | Scn2aB10 | mRn7sk | 1.27 | 1.32 | 1.25 | 1.28 | 0.04 | 0.21 |
| 061_hRNU1-3_Scn2aB10_hRNU12 | 061 | hRNU1-3 | Scn2aB10 | hRNU12 | 1.76 | 0.96 | 1.17 | 1.30 | 0.41 | 0.19 |
| 034_hRNU1-2_Scn2aB10_hRNU5A-1 | 034 | hRNU1-2 | Scn2aB10 | hRNU5A-1 | 1.37 | 1.19 | 1.34 | 1.30 | 0.10 | 0.18 |
| 055_hRNU1-3_Scn2aB10_hU3 | 055 | hRNU1-3 | Scn2aB10 | hU3 | 1.29 | 1.50 | 1.12 | 1.30 | 0.19 | 0.18 |
| 078_hRNU2-1_Scn2aB10_hU3 | 078 | hRNU2-1 | Scn2aB10 | hU3 | 1.42 | 1.19 | 1.32 | 1.31 | 0.12 | 0.17 |
| 012_hRNU1-1_Scn2aB10_hRNU6-1 | 012 | hRNU1-1 | Scn2aB10 | hRNU6-1 | 1.35 | 1.50 | 1.09 | 1.31 | 0.20 | 0.16 |
| 037_hRNU1-2_Scn2aB10_hRNU11 | 037 | hRNU1-2 | Scn2aB10 | hRNU11 | 1.53 | 1.12 | 1.30 | 1.32 | 0.21 | 0.16 |
| 025_hRNU1-1_Scn2aB10_mRnu11 | 025 | hRNU1-1 | Scn2aB10 | mRnu11 | 1.78 | 1.31 | 0.87 | 1.32 | 0.46 | 0.15 |
| 007_hRNU1-1_Scn2aB10_hRNU1-3 | 007 | hRNU1-1 | Scn2aB10 | hRNU1-3 | 1.44 | 1.32 | 1.21 | 1.32 | 0.11 | 0.15 |
| 077_hRNU2-1_Scn2aB10_hRNU2-1 | 077 | hRNU2-1 | Scn2aB10 | hRNU2-1 | 1.54 | 1.15 | 1.29 | 1.33 | 0.20 | 0.14 |
| 022_hRNU1-1_Scn2aB10_mRnu5g | 022 | hRNU1-1 | Scn2aB10 | mRnu5g | 1.33 | 1.41 | 1.24 | 1.33 | 0.08 | 0.14 |
| 019_hRNU1-1_Scn2aB10_mRnu1b6 | 019 | hRNU1-1 | Scn2aB10 | mRnu1b6 | 1.98 | 1.04 | 0.98 | 1.33 | 0.56 | 0.14 |
| 003_mu1a1_Scn2aD12_U1 | 003 | mula1 | Scn2aD12 | U1 | 0.95 | 1.49 | 1.59 | 1.34 | 0.35 | 0.12 |
| 065_hRNU1-3_Scn2aB10_mRnu1b6 | 065 | hRNU1-3 | Scn2aB10 | mRnu1b6 | 1.57 | 1.39 | 1.07 | 1.34 | 0.25 | 0.12 |
| 045_hRNU1-2_Scn2aB10_mRnu5g | 045 | hRNU1-2 | Scn2aB10 | mRnu5g | 1.42 | 1.21 | 1.40 | 1.35 | 0.11 | 0.12 |
| 018_hRNU1-1_Scn2aB10_mRnu1b1 | 018 | hRNU1-1 | Scn2aB10 | mRnu1b1 | 1.75 | 1.38 | 0.93 | 1.35 | 0.41 | 0.11 |
| 070_hRNU1-3_Scn2aB10_mRnu7 | 070 | hRNU1-3 | Scn2aB10 | mRnu7 | 1.59 | 1.26 | 1.21 | 1.35 | 0.21 | 0.11 |
| 006_hRNU1-1_Scn2aB10_hRNU1-2 | 006 | hRNU1-1 | Scn2aB10 | hRNU1-2 | 0.98 | 1.92 | 1.16 | 1.36 | 0.50 | 0.11 |
| 024_hRNU1-1_Scn2aB10_mRnu7 | 024 | hRNU1-1 | Scn2aB10 | mRnu7 | 1.54 | 1.43 | 1.11 | 1.36 | 0.22 | 0.11 |
| 035_hRNU1-2_Scn2aB10_hRNU6-1 | 035 | hRNU1-2 | Scn2aB10 | hRNU6-1 | 1.48 | 1.47 | 1.16 | 1.37 | 0.18 | 0.10 |
| 079_hRNU2-1_Scn2aB10_hRNU4-1 | 079 | hRNU2-1 | Scn2aB10 | hRNU4-1 | 1.44 | 1.40 | 1.34 | 1.39 | 0.05 | 0.08 |
| 040_hRNU1-2_Scn2aB10_mRnu1a1 | 040 | hRNU1-2 | Scn2aB10 | mRnu1a1 | 1.21 | 1.28 | 1.72 | 1.41 | 0.27 | 0.07 |
| 015_hRNU1-1_Scn2aB10_hRNU12 | 015 | hRNU1-1 | Scn2aB10 | hRNU12 | 1.43 | 1.45 | 1.34 | 1.41 | 0.06 | 0.07 |
| 095_hRNU2-1_Scn2aB10_mRnu12 | 095 | hRNU2-1 | Scn2aB10 | mRnu12 | 1.61 | 1.12 | 1.55 | 1.43 | 0.27 | 0.05 |
| 057_hRNU1-3_Scn2aB10_hRNU5A-1 | 057 | hRNU1-3 | Scn2aB10 | hRNU5A-1 | 1.35 | 1.48 | 1.45 | 1.43 | 0.07 | 0.05 |
| 089_hRNU2-1_Scn2aB10_mRnu2-10 | 089 | hRNU2-1 | Scn2aB10 | mRnu2-10 | 1.53 | 1.71 | 1.11 | 1.45 | 0.31 | 0.04 |
| 030_hRNU1-2_Scn2aB10_hRNU1-3 | 030 | hRNU1-2 | Scn2aB10 | hRNU1-3 | 1.10 | 1.61 | 1.66 | 1.45 | 0.31 | 0.04 |
| 066_hRNU1-3_Scn2aB10_mRnu2-10 | 066 | hRNU1-3 | Scn2aB10 | mRnu2-10 | 1.71 | 1.65 | 1.04 | 1.47 | 0.37 | 0.03 |
| 038_hRNU1-2_Scn2aB10_hRNU12 | 038 | hRNU1-2 | Scn2aB10 | hRNU12 | 1.62 | 1.33 | 1.47 | 1.47 | 0.14 | 0.03 |
| 029_hRNU1-2_Scn2aB10_hRNU1-2 | 029 | hRNU1-2 | Scn2aB10 | hRNU1-2 | 1.68 | 1.28 | 1.49 | 1.48 | 0.20 | 0.03 |
| 082_hRNU2-1_Scn2aB10_RNU7-1 | 082 | hRNU2-1 | Scn2aB10 | RNU7-1 | 1.45 | 2.18 | 0.85 | 1.49 | 0.67 | 0.03 |
| 076_hRNU2-1_Scn2aB10_hRNU1-3 | 076 | hRNU2-1 | Scn2aB10 | hRNU1-3 | 1.67 | 1.49 | 1.35 | 1.50 | 0.16 | 0.02 |
| 041_hRNU1-2_Scn2aB10_mRnu1b1 | 041 | hRNU1-2 | Scn2aB10 | mRnu1b1 | 1.37 | 1.73 | 1.42 | 1.51 | 0.19 | 0.02 |
| 094_hRNU2-1_Scn2aB10_mRnu11 | 094 | hRNU2-1 | Scn2aB10 | mRnu11 | 1.54 | 1.58 | 1.44 | 1.52 | 0.07 | 0.02 |
| 088_hRNU2-1_Scn2aB10_mRnu1b6 | 088 | hRNU2-1 | Scn2aB10 | mRnu1b6 | 1.49 | 1.49 | 1.58 | 1.52 | 0.05 | 0.02 |
| 068_hRNU1-3_Scn2aB10_mRnu5g | 068 | hRNU1-3 | Scn2aB10 | mRnu5g | 1.13 | 1.74 | 1.70 | 1.52 | 0.34 | 0.02 |
| 087_hRNU2-1_Scn2aB10_mRnu1b1 | 087 | hRNU2-1 | Scn2aB10 | mRnu1b1 | 1.23 | 1.79 | 1.55 | 1.53 | 0.28 | 0.02 |
| 080_hRNU2-1_Scn2aB10_hRNU5A-1 | 080 | hRNU2-1 | Scn2aB10 | hRNU5A-1 | 1.88 | 1.58 | 1.14 | 1.54 | 0.37 | 0.02 |
| 047_hRNU1-2_Scn2aB10_mRnu7 | 047 | hRNU1-2 | Scn2aB10 | mRnu7 | 1.26 | 1.63 | 1.72 | 1.54 | 0.24 | 0.01 |
| 056_hRNU1-3_Scn2aB10_hRNU4-1 | 056 | hRNU1-3 | Scn2aB10 | hRNU4-1 | 1.59 | 1.83 | 1.19 | 1.54 | 0.32 | 0.01 |
| 011_hRNU1-1_Scn2aB10_hRNU5A-1 | 011 | hRNU1-1 | Scn2aB10 | hRNU5A-1 | 1.30 | 2.09 | 1.24 | 1.54 | 0.48 | 0.01 |
| 075_hRNU2-1_Scn2aB10_hRNU1-2 | 075 | hRNU2-1 | Scn2aB10 | hRNU1-2 | 1.57 | 1.52 | 1.56 | 1.55 | 0.03 | 0.01 |
| 093_hRNU2-1_Scn2aB10_mRnu7 | 093 | hRNU2-1 | Scn2aB10 | mRnu7 | 1.38 | 1.88 | 1.39 | 1.55 | 0.28 | 0.01 |
| 009_hRNU1-1_Scn2aB10_hU3 | 009 | hRNU1-1 | Scn2aB10 | hU3 | 1.82 | 1.37 | 1.46 | 1.55 | 0.24 | 0.01 |
| 084_hRNU2-1_Scn2aB10_hRNU12 | 084 | hRNU2-1 | Scn2aB10 | hRNU12 | 1.68 | 1.50 | 1.47 | 1.55 | 0.11 | 0.01 |
| 083_hRNU2-1_Scn2aB10_hRNU11 | 083 | hRNU2-1 | Scn2aB10 | hRNU11 | 1.42 | 1.87 | 1.44 | 1.58 | 0.25 | 0.009 |
| 026_hRNU1-1_Scn2aB10_mRnu12 | 026 | hRNU1-1 | Scn2aB10 | mRnu12 | 1.30 | 1.68 | 1.91 | 1.63 | 0.31 | 0.004 |
| 074_hRNU2-1_Scn2aB10_hRNU1-1 | 074 | hRNU2-1 | Scn2aB10 | hRNU1-1 | 1.60 | 1.71 | 1.83 | 1.71 | 0.11 | 0.001 |
| 099_mu1a1_Scn2aD12_U1 | 099 | mu1a1 | Scn2aD12 | U1 | 2.02 | 1.67 | 1.50 | 1.73 | 0.27 | <0.001 |
| 010_hRNU1-1_Scn2aB10_hRNU4-1 | 010 | hRNU1-1 | Scn2aB10 | hRNU4-1 | 1.61 | 1.74 | 1.91 | 1.75 | 0.15 | <0.001 |
| 004_mu1a1_Scn2aB10_U1 | 004 | mu1a1 | Scn2aB10 | U1 | 1.57 | 2.11 | 1.62 | 1.77 | 0.30 | <0.001 |
| 028_hRNU1-2_Scn2aB10_hRNU1-1 | 028 | hRNU1-2 | Scn2aB10 | hRNU1-1 | 1.72 | 1.55 | 2.04 | 1.77 | 0.25 | <0.001 |
| 091_hRNU2-1_Scn2aB10_mRnu5g | 091 | hRNU2-1 | Scn2aB10 | mRnu5g | 1.50 | 2.16 | 1.87 | 1.84 | 0.33 | <0.001 |
| 017_hRNU1-1_Scn2aB10_mRnu1a1 | 017 | hRNU1-1 | Scn2aB10 | mRnu1a1 | 2.02 | 1.84 | 1.71 | 1.86 | 0.16 | <0.001 |

TABLE 12
Library 2 Summary

| Name | Rep1 | Rep2 | Rep3 | Average | SD | P-Value |
|---|---|---|---|---|---|---|
| 114_hU3_Scn2aB10_mRnu1b1 | 0.70 | 0.99 | 1.20 | 0.96 | 0.25 | 0.91 |
| 194_mu1a1_Scr2_U1 | 1.00 | 1.00 | 1.00 | 1.00 | 0.00 | Control |
| 113_hU3_Scn2aB10_mRnu1a1 | 0.89 | 0.89 | 1.26 | 1.01 | 0.22 | 0.97 |
| 178_hRNU6- | 0.95 | 0.98 | 1.18 | 1.04 | 0.12 | 0.91 |
| 1_Scn2aB10_RNU7-1 | | | | | | |
| 172_hRNU6- | 0.83 | 0.96 | 1.38 | 1.06 | 0.29 | 0.86 |
| 1_Scn2aB10_hRNU1-3 | | | | | | |
| 104_hU3_Scn2aB10_hRNU2-1 | 0.47 | 1.25 | 1.49 | 1.07 | 0.53 | 0.82 |
| 179_hRNU6- | 0.89 | 0.97 | 1.38 | 1.08 | 0.26 | 0.8 |
| 1_Scn2aB10_hRNU11 | | | | | | |
| 111_hU3_Scn2aB10_hRNU12 | 1.06 | 0.90 | 1.30 | 1.08 | 0.20 | 0.78 |
| 108_hU3_Scn2aB10_hRNU6-1 | 0.86 | 1.19 | 1.23 | 1.09 | 0.20 | 0.77 |
| 117_hU3_Scn2aB10_mRnu3b1 | 0.66 | 1.05 | 1.57 | 1.09 | 0.45 | 0.77 |
| 112_hU3_Scn2aB10_hRN7SK | 0.95 | 1.07 | 1.28 | 1.10 | 0.17 | 0.75 |
| 110_hU3_Scn2aB10_hRNU11 | 1.14 | 0.70 | 1.55 | 1.13 | 0.43 | 0.68 |
| 115_hU3_Scn2aB10_mRnu1b6 | 1.00 | 0.84 | 1.59 | 1.14 | 0.40 | 0.65 |
| 106_hU3_Scn2aB10_hRNU4-1 | 1.12 | 1.03 | 1.42 | 1.19 | 0.20 | 0.54 |
| 103_hU3_Scn2aB10_hRNU1-3 | 1.03 | 1.27 | 1.29 | 1.19 | 0.15 | 0.53 |
| 189_hRNU6- | 0.77 | 1.14 | 1.74 | 1.22 | 0.49 | 0.49 |
| 1_Scn2aB10_mRnu7 | | | | | | |
| 101_hU3_Scn2aB10_hRNU1-1 | 0.88 | 1.17 | 1.63 | 1.23 | 0.38 | 0.47 |
| 109_hU3_Scn2aB10_RNU7-1 | 1.14 | 0.94 | 1.61 | 1.23 | 0.34 | 0.46 |
| 123_hU3_Scn2aB10_mRn7sk | 1.08 | 1.47 | 1.24 | 1.27 | 0.19 | 0.4 |
| 122_hU3_Scn2aB10_mRnu12 | 0.93 | 1.47 | 1.41 | 1.27 | 0.30 | 0.39 |
| 181_hRNU6- | 0.99 | 1.08 | 1.82 | 1.30 | 0.46 | 0.34 |
| 1_Scn2aB10_hRN7SK | | | | | | |
| 163_hRNU5A- | 1.12 | 1.23 | 1.59 | 1.3 | 0.25 | 0.32 |
| 1_Scn2aB10_mRnu3b1 | | | | | | |
| 169_hRNU5A- | 1.06 | 1.09 | 1.80 | 1.32 | 0.42 | 0.31 |
| 1_Scn2aB10_mRn7sk | | | | | | |
| 162_hRNU5A- | 1.43 | 1.49 | 1.07 | 1.33 | 0.22 | 0.29 |
| 1_Scn2aB10_mRnu2-10 | | | | | | |
| 102_hU3_Scn2aB10_hRNU1-2 | 1.08 | 1.55 | 1.37 | 1.33 | 0.23 | 0.29 |
| 191_hRNU6- | 0.93 | 1.48 | 1.59 | 1.33 | 0.36 | 0.29 |
| 1_Scn2aB10_mRnu12 | | | | | | |
| 186_hRNU6- | 1.23 | 1.23 | 1.58 | 1.34 | 0.20 | 0.27 |
| 1_Scn2aB10_mRnu3b1 | | | | | | |
| 192_hRNU6- | 1.07 | 1.08 | 1.94 | 1.36 | 0.50 | 0.25 |
| 1_Scn2aB10_mRn7sk | | | | | | |
| 107_hU3_Scn2aB10_hRNU5A-1 | 1.24 | 0.97 | 1.92 | 1.38 | 0.49 | 0.23 |
| 200_RNU7- | 1.52 | 1.27 | 1.44 | 1.41 | 0.13 | 0.19 |
| 1_Scn2aB10_hRNU2-1 | | | | | | |
| 121_hU3_Scn2aB10_mRnu11 | 1.09 | 1.45 | 1.71 | 1.42 | 0.31 | 0.18 |
| 133_hRNU4- | 0.94 | 2.29 | 1.04 | 1.42 | 0.75 | 0.18 |
| 1_Scn2aB10_hRNU11 | | | | | | |
| 116_hU3_Scn2aB10_mRnu2-10 | 1.27 | 1.53 | 1.47 | 1.42 | 0.14 | 0.18 |
| 193_mu1a1_Scn2aF1Scr2_U1 | 1.57 | 1.05 | 1.70 | 1.44 | 0.34 | 0.16 |
| 175_hRNU6- | 1.16 | 1.24 | 1.95 | 1.45 | 0.44 | 0.15 |
| 1_Scn2aB10_hRNU4-1 | | | | | | |
| 187_hRNU6- | 1.19 | 1.78 | 1.47 | 1.48 | 0.29 | 0.13 |
| 1_Scn2aB10_mRnu5g | | | | | | |
| 146_hRNU4- | 1.35 | 1.50 | 1.58 | 1.48 | 0.12 | 0.13 |
| 1_Scn2aB10_mRn7sk | | | | | | |
| 190_hRNU6- | 1.17 | 1.76 | 1.54 | 1.49 | 0.30 | 0.12 |
| 1_Scn2aB10_mRnu11 | | | | | | |
| 139_hRNU4- | 1.45 | 1.76 | 1.26 | 1.49 | 0.25 | 0.12 |
| 1_Scn2aB10_mRnu2-10 | | | | | | |
| 120_hU3_Scn2aB10_mRnu7 | 1.51 | 1.31 | 1.67 | 1.50 | 0.18 | 0.11 |
| 182_hRNU6- | 1.14 | 1.50 | 1.86 | 1.50 | 0.36 | 0.11 |
| Scn2aB10_mRnu1a1 | | | | | | |
| 177_hRNU6- | 0.70 | 1.52 | 2.34 | 1.52 | 0.82 | 0.1 |
| 1_Scn2aB10_hRNU6-1 | | | | | | |
| 180_hRNU6- | 0.92 | 1.61 | 2.13 | 1.55 | 0.61 | 0.08 |
| 1_Scn2aB10_hRNU12 | | | | | | |
| 176_hRNU6- | 1.36 | 1.17 | 2.18 | 1.57 | 0.54 | 0.07 |
| 1_Scn2aB10_hRNU5A-1 | | | | | | |
| 183_hRNU6- | 0.90 | 1.16 | 2.77 | 1.61 | 1.02 | 0.05 |
| 1_Scn2aB10_mRnu1b1 | | | | | | |
| 144_hRNU4- | 1.35 | 1.53 | 1.95 | 1.61 | 0.31 | 0.05 |
| 1_Scn2aB10_mRnu11 | | | | | | |
| 127_hRNU4- | 1.35 | 1.76 | 1.75 | 1.62 | 0.23 | 0.05 |
| 1_Scn2aB10_hRNU2-1 | | | | | | |
| 161_hRNU5A- | 1.60 | 1.21 | 2.13 | 1.65 | 0.46 | 0.04 |
| 1_Scn2aB10_mRnu1b6 | | | | | | |
| 140_hRNU4- | 1.37 | 1.52 | 2.12 | 1.67 | 0.40 | 0.03 |
| 1_Scn2aB10_mRnu3b1 | | | | | | |
| 174_hRNU6-1_Scn2aB10_hU3 | 1.45 | 1.47 | 2.13 | 1.68 | 0.39 | 0.03 |
| 185_hRNU6- | 1.07 | 1.97 | 2.02 | 1.69 | 0.53 | 0.03 |
| 1_Scn2aB10_mRnu2-10 | | | | | | |
| 135_hRNU4- | 1.13 | 1.36 | 2.58 | 1.69 | 0.78 | 0.03 |
| 1_Scn2aB10_hRN7SK | | | | | | |
| 150_hRNU5A- | 1.36 | 1.68 | 2.05 | 1.70 | 0.34 | 0.03 |
| 1_Scn2aB10_hRNU2-1 | | | | | | |
| 131_hRNU4- | 1.14 | 2.08 | 1.90 | 1.71 | 0.50 | 0.02 |
| 1_Scn2aB10_hRNU6-1 | | | | | | |
| 173_hRNU6- | 1.67 | 1.92 | 1.53 | 1.71 | 0.20 | 0.02 |
| 1_Scn2aB10_hRNU2-1 | | | | | | |
| 164_hRNU5A- | 1.09 | 2.14 | 1.89 | 1.7 | 0.55 | 0.02 |
| 1_Scn2aB10_mRnu5g | | | | | | |
| 145_hRNU4- | 1.01 | 1.59 | 2.52 | 1.71 | 0.76 | 0.02 |
| 1_Scn2aB10_mRnu12 | | | | | | |
| 199_RNU7- | 1.50 | 1.37 | 2.28 | 1.72 | 0.49 | 0.02 |
| 1_Scn2aB10_hRNU1-3 | | | | | | |
| 201_RNU7-1_Scn2aB10_hU3 | 1.64 | 1.34 | 2.17 | 1.72 | 0.42 | 0.02 |
| 170_hRNU6- | 1.33 | 2.00 | 1.83 | 1.72 | 0.35 | 0.02 |
| 1_Scn2aB10_hRNU1-1 | | | | | | |
| 184_hRNU6- | 1.18 | 1.61 | 2.43 | 1.74 | 0.63 | 0.02 |
| 1_Scn2aB10_mRnu1b6 | | | | | | |
| 137_hRNU4- | 1.53 | 1.43 | 2.34 | 1.77 | 0.50 | 0.01 |
| 1_Scn2aB10_mRnu1b1 | | | | | | |
| 198_RNU7- | 1.06 | 1.35 | 2.97 | 1.79 | 1.03 | 0.01 |
| 1_Scn2aB10_hRNU1-2 | | | | | | |
| 118_hU3_Scn2aB10_mRnu5g | 1.22 | 2.01 | 2.18 | 1.80 | 0.51 | 0.01 |
| 196_mu1a1_Scn2aB10_U1 | 1.45 | 1.55 | 2.48 | 1.83 | 0.57 | 0.009 |
| 158_hRNU5A- | 1.10 | 1.87 | 2.53 | 1.83 | 0.72 | 0.008 |
| 1_Scn2aB10_hRN7SK | | | | | | |
| 154_hRNU5A- | 1.82 | 1.61 | 2.08 | 1.84 | 0.24 | 0.008 |
| 1_Scn2aB10_hRNU6-1 | | | | | | |
| 149_hRNU5A- | 1.34 | 1.67 | 2.64 | 1.88 | 0.68 | 0.005 |
| 1_Scn2aB10_hRNU1-3 | | | | | | |
| 124_hRNU4- | 1.55 | 2.30 | 1.85 | 1.90 | 0.38 | 0.004 |
| 1_Scn2aB10_hRNU1-1 | | | | | | |
| 171_hRNU6- | 1.72 | 1.37 | 2.68 | 1.93 | 0.68 | 0.004 |
| 1_Scn2aB10_hRNU1-2 | | | | | | |
| 138_hRNU4- | 1.38 | 2.11 | 2.42 | 1.97 | 0.53 | 0.002 |
| 1_Scn2aB10_mRnu1b6 | | | | | | |
| 152_hRNU5A- | 2.47 | 1.90 | 1.58 | 1.99 | 0.45 | 0.002 |
| 1_Scn2aB10_hRNU4-1 | | | | | | |
| 130_hRNU4- | 1.68 | 2.14 | 2.16 | 1.99 | 0.27 | 0.002 |
| 1_Scn2aB10_hRNU5A-1 | | | | | | |
| 132_hRNU4- | 1.10 | 2.25 | 2.62 | 1.99 | 0.79 | 0.002 |
| 1_Scn2aB10_RNU7-1 | | | | | | |
| 156_hRNU5A- | 1.58 | 1.91 | 2.53 | 2.00 | 0.48 | 0.001 |
| 1_Scn2aB10_hRNU11 | | | | | | |
| 168_hRNU5A- | 2.10 | 1.81 | 2.14 | 2.01 | 0.18 | 0.001 |
| 1_Scn2aB10_mRnu12 | | | | | | |
| 126_hRNU4- | 0.89 | 2.60 | 2.68 | 2.05 | 1.01 | <0.001 |
| 1_Scn2aB10_hRNU1-3 | | | | | | |
| 136_hRNU4- | 2.31 | 1.44 | 2.49 | 2.08 | 0.57 | <0.001 |
| 1_Scn2aB10_mRnu1a1 | | | | | | |
| 143_hRNU4- | 2.24 | 1.51 | 2.53 | 2.09 | 0.53 | <0.001 |
| 1_Scn2aB10_mRnu7 | | | | | | |
| 141_hRNU4- | 2.12 | 2.06 | 2.12 | 2.10 | 0.03 | <0.001 |
| 1_Scn2aB10_mRnu5g | | | | | | |
| 160_hRNU5A- | 1.17 | 2.63 | 2.60 | 2.13 | 0.83 | <0.001 |
| 1_Scn2aB10_mRnu1b1 | | | | | | |
| 148_hRNU5A- | 1.31 | 2.75 | 2.49 | 2.18 | 0.77 | <0.001 |
| 1_Scn2aB10_hRNU1-2 | | | | | | |
| 125_hRNU4- | 1.64 | 2.48 | 2.44 | 2.19 | 0.47 | <0.001 |
| 1_Scn2aB10_hRNU1-2 | | | | | | |
| 100_mu1a1_Scn2aB10_U1 | 2.15 | 1.40 | 3.08 | 2.21 | 0.84 | <0.001 |
| 134_hRNU4- | 2.03 | 2.34 | 2.34 | 2.24 | 0.18 | <0.001 |
| 1_Scn2aB10_hRNU12 | | | | | | |
| 129_hRNU4- | 1.63 | 1.75 | 3.40 | 2.26 | 0.99 | <0.001 |
| 1_Scn2aB10_hRNU4-1 | | | | | | |
| 128_hRNU4-1_Scn2aB10_hU3 | 1.67 | 2.47 | 2.74 | 2.29 | 0.55 | <0.001 |
| 197_RNU7- | 1.50 | 2.31 | 3.26 | 2.36 | 0.88 | <0.001 |
| 1_Scn2aB10_hRNU1-1 | | | | | | |
| 159_hRNU5A- | 1.56 | 3.04 | 2.63 | 2.41 | 0.77 | <0.001 |
| 1_Scn2aB10_mRnu1a1 | | | | | | |
| 153_hRNU5A- | 2.89 | 1.60 | 2.84 | 2.44 | 0.73 | <0.001 |
| 1_Scn2aB10_hRNU5A-1 | | | | | | |
| 195 mu1a1_Scn2aD12_U1 | 1.75 | 2.06 | 3.58 | 2.47 | 0.98 | <0.001 |
| 157_hRNU5A- | 2.12 | 2.75 | 2.61 | 2.49 | 0.33 | <0.001 |
| 1_Scn2aB10_hRNU12 | | | | | | |
| 166_hRNU5A- | 1.85 | 2.95 | 3.27 | 2.69 | 0.74 | <0.001 |
| 1_Scn2aB10_mRnu7 | | | | | | |

TABLE 13
Library 3 Summary

| | | | | | | | | | | P-value |
|---|---|---|---|---|---|---|---|---|---|---|
| Name | ID | Promoter | U7 | Terminator | Rep1 | Rep2 | Rep3 | Average | SD | (ANOVA) |
| 259_hRNU12_Scn | 259 | hRNU12 | Scn2a | mRnu3b1 | 0.77 | 0.63 | 0.70 | 0.70 | 0.07 | 0.15 |
| 2aB10_mRnu3b1 | | | B10 | | | | | | | |
| 282_hRN7SK_Scn | 282 | hRN7SK | Scn2a | mRnu3b1 | 1.00 | 0.83 | 0.85 | 0.89 | 0.09 | 0.79 |
| 2aB10_mRnu3b1 | | | B10 | | | | | | | |
| 285_hRN7SK_Scn | 285 | hRN7SK | Scn2a | mRnu7 | 1.03 | 0.80 | 0.86 | 0.90 | 0.12 | 0.81 |
| 2aB10_mRnu7 | | | B10 | | | | | | | |
| 274_hRN7SK_Scn | 274 | hRN7SK | Scn2a | RNU7-1 | 0.93 | 1.00 | 0.78 | 0.90 | 0.11 | 0.84 |
| 2aB10_RNU7-1 | | | B10 | | | | | | | |
| 250_hRNU12_Scn | 250 | hRNU12 | Scn2a | hRNU6-1 | 0.98 | 0.89 | 0.86 | 0.91 | 0.06 | 0.87 |
| 2aB10_hRNU6-1 | | | B10 | | | | | | | |
| 290_mu1a1_Scr2_U1 | 290 | mu1a1 | Scr2 | U1 | 0.99 | 1.06 | 0.76 | 0.94 | 0.15 | Control |
| 251_hRNU12_Scn | 251 | hRNU12 | Scn2a | RNU7-1 | 0.89 | 1.13 | 0.89 | 0.97 | 0.14 | 0.84 |
| 2aB10_RNU7-1 | | | B10 | | | | | | | |
| 267_hRN7SK_Scn | 267 | hRN7SK | Scn2a | hRNU1-2 | 1.06 | 1.03 | 0.92 | 1.00 | 0.07 | 0.69 |
| 2aB10_hRNU1-2 | | | B10 | | | | | | | |
| 254_hRNU12_Scn | 254 | hRNU12 | Scn2a | hRN7SK | 0.88 | 1.22 | 0.91 | 1.00 | 0.18 | 0.69 |
| 2aB10_hRN7SK | | | B10 | | | | | | | |
| 273_hRN7SK_Scn | 273 | hRN7SK | Scn2a | hRNU6-1 | 1.14 | 0.99 | 0.97 | 1.03 | 0.09 | 0.56 |
| 2aB10_hRNU6-1 | | | B10 | | | | | | | |
| 268_hRN7SK_Scn | 268 | hRN7SK | Scn2a | hRNU1-3 | 1.02 | 0.99 | 1.15 | 1.05 | 0.09 | 0.48 |
| 2aB10_hRNU1-3 | | | B10 | | | | | | | |
| 271_hRN7SK_Scn | 271 | hRN7SK | Scn2a | hRNU4-1 | 1.07 | 1.14 | 0.97 | 1.06 | 0.09 | 0.46 |
| 2aB10_hRNU4-1 | | | B10 | | | | | | | |
| 289_mu1a1_Scn2a | 289 | mu1a1 | Scn2a | U1 | 1.01 | 0.94 | 1.2 | 1.06 | 0.15 | 0.44 |
| F1Scr2_U1 | | | F1Scr2 | | | | | | | |
| 275_hRN7SK_Scn | 275 | hRN7SK | Scn2a | hRNU11 | 1.03 | 1.11 | 1.10 | 1.08 | 0.05 | 0.39 |
| 2aB10_hRNU11 | | | B10 | | | | | | | |
| 266_hRN7SK_Scn | 266 | hRN7SK | Scn2a | hRNU1-1 | 1.17 | 1.02 | 1.05 | 1.08 | 0.08 | 0.39 |
| 2aB10_hRNU1-1 | | | B10 | | | | | | | |
| 247_hRNU12_Scn | 247 | hRNU12 | Scn2a | hU3 | 0.82 | 1.26 | 1.17 | 1.09 | 0.23 | 0.38 |
| 2aB10_hU3 | | | B10 | | | | | | | |
| 257_hRNU12_Scn | 257 | hRNU12 | Scn2a | mRnu1b6 | 0.98 | 1.09 | 1.19 | 1.09 | 0.11 | 0.37 |
| 2aB10_mRnu1b6 | | | B10 | | | | | | | |
| 283_hRN7SK_Scn | 283 | hRN7SK | Scn2a | mRnu5g | 0.99 | 1.30 | 1.04 | 1.11 | 0.17 | 0.3 |
| 2aB10_mRnu5g | | | B10 | | | | | | | |
| 264_hRNU12_Scn | 264 | hRNU12 | Scn2a | mRnu12 | 1.18 | 1.11 | 1.04 | 1.11 | 0.07 | 0.3 |
| 2aB10_mRnu12 | | | B10 | | | | | | | |
| 246_hRNU12_Scn | 246 | hRNU12 | Scn2a | hRNU2-1 | 1.15 | 1.13 | 1.07 | 1.12 | 0.04 | 0.28 |
| 2aB10_hRNU2-1 | | | B10 | | | | | | | |
| 249_hRNU12_Scn | 249 | hRNU12 | Scn2a | hRNU5A-1 | 1.04 | 1.27 | 1.05 | 1.12 | 0.13 | 0.27 |
| 2aB10_hRNU5A-1 | | | B10 | | | | | | | |
| 248_hRNU12_Scn | 248 | hRNU12 | Scn2a | hRNU4-1 | 1.01 | 1.19 | 1.17 | 1.13 | 0.10 | 0.26 |
| 2aB10_hRNU4-1 | | | B10 | | | | | | | |
| 280_hRN7SK_Scn | 280 | hRN7SK | Scn2a | mRnu1b6 | 1.16 | 1.16 | 1.0 | 1.13 | 0.05 | 0.24 |
| 2aB10_mRnu1b6 | | | B10 | | | | | | | |
| 265_hRNU12_Scn | 265 | hRNU12 | Scn2a | mRn7sk | 1.13 | 1.20 | 1.06 | 1.13 | 0.07 | 0.24 |
| 2aB10_mRn7sk | | | B10 | | | | | | | |
| 256_hRNU12_Scn | 256 | hRNU12 | Scn2a | mRnu1b1 | 1.01 | 1.14 | 1.26 | 1.14 | 0.12 | 0.23 |
| 2aB10_mRnu1b1 | | | B10 | | | | | | | |
| 281_hRN7SK_Scn | 281 | hRN7SK | Scn2a | mRnu2-10 | 1.31 | 1.01 | 1.10 | 1.14 | 0.16 | 0.22 |
| 2aB10_mRnu2-10 | | | B10 | | | | | | | |
| 278_hRN7SK_Scn | 278 | hRN7SK | Scn2a | mRnu1a1 | 1.02 | 1.22 | 1.19 | 1.15 | 0.11 | 0.21 |
| 2aB10_mRnu1a1 | | | B10 | | | | | | | |
| 276_hRN7SK_Scn | 276 | hRN7SK | Scn2a | hRNU12 | 1.35 | 1.32 | 0.82 | 1.16 | 0.30 | 0.17 |
| 2aB10_hRNU12 | | | B10 | | | | | | | |
| 263_hRNU12_Scn | 263 | hRNU12 | Scn2a | mRnu11 | 1.25 | 1.25 | 0.99 | 1.16 | 0.15 | 0.17 |
| 2aB10_mRnu11 | | | B10 | | | | | | | |
| 242_hRNU11_Scn | 242 | hRNU11 | Scn2a | mRn7sk | 1.12 | 1.20 | 1.29 | 1.21 | 0.09 | 0.11 |
| 2aB10_mRn7sk | | | B10 | | | | | | | |
| 213_RNU7- | 213 | RNU7-1 | Scn2a | mRnu3b1 | 1.26 | 1.17 | 1.20 | 1.21 | 0.05 | 0.1 |
| 1_Scn2aB10_ | | | B10 | | | | | | | |
| mRnu3b1 | | | | | | | | | | |
| 258_hRNU12_Scn | 258 | hRNU12 | Scn2a | mRnu2-10 | 1.21 | 1.44 | 1.00 | 1.21 | 0.22 | 0.09 |
| 2aB10_mRnu2-10 | | | B10 | | | | | | | |
| 287_hRN7SK_Scn | 287 | hRN7SK | Scn2a | mRnu12 | 1.10 | 1.52 | 1.03 | 1.22 | 0.27 | 0.09 |
| 2aB10_mRnu12 | | | B10 | | | | | | | |
| 279_hRN7SK_Scn | 279 | hRN7SK | Scn2a | mRnu1b1 | 1.31 | 1.14 | 1.20 | 1.22 | 0.09 | 0.09 |
| 2aB10_mRnu1b1 | | | B10 | | | | | | | |
| 270_hRN7SK_Scn | 270 | hRN7SK | Scn2a | hU3 | 1.10 | 1.5 | 1.07 | 1.22 | 0.24 | 0.08 |
| 2aB10_hU3 | | | B10 | | | | | | | |
| 252_hRNU12_Scn | 252 | hRNU12 | Scn2a | hRNU11 | 1.18 | 1.40 | 1.16 | 1.25 | 0.13 | 0.06 |
| 2aB10_hRNU11 | | | B10 | | | | | | | |
| 231_hRNU11_Scn | 231 | hRNU11 | Scn2a | hRN7SK | 1.26 | 1.27 | 1.23 | 1.25 | 0.02 | 0.06 |
| 2aB10_hRN7SK | | | B10 | | | | | | | |
| 272_hRN7SK_Scn | 272 | hRN7SK | Scn2a | hRNU5A-1 | 1.10 | 1.35 | 1.36 | 1.27 | 0.15 | 0.05 |
| 2aB10_hRNU5A-1 | | | B10 | | | | | | | |
| 227_hRNU11_Scn | 227 | hRNU11 | Scn2a | hRNU6-1 | 1.24 | 1.43 | 1.19 | 1.29 | 0.13 | 0.04 |
| 2aB10_hRNU6-1 | | | B10 | | | | | | | |
| 205_RNU7- | 205 | RNU7-1 | Scn2a | RNU7-1 | 1.11 | 1.62 | 1.14 | 1.29 | 0.29 | 0.03 |
| 1_Scn2aB10_ | | | B10 | | | | | | | |
| RNU7-1 | | | | | | | | | | |
| 277_hRN7SK_Scn | 277 | hRN7SK | Scn2a | hRN7SK | 1.10 | 1.46 | 1.32 | 1.29 | 0.18 | 0.03 |
| 2aB10_hRN7SK | | | B10 | | | | | | | |
| 255_hRNU12_Scn | 255 | hRNU12 | Scn2a | mRnu1a1 | 1.47 | 1.20 | 1.22 | 1.30 | 0.15 | 0.03 |
| 2aB10_mRnu1a1 | | | B10 | | | | | | | |
| 207_RNU7- | 207 | RNU7-1 | Scn2a | hRNU12 | 1.29 | 1.44 | 1.21 | 1.31 | 0.12 | 0.02 |
| 1_Scn2aB10_hRNU12 | | | B10 | | | | | | | |
| 245_hRNU12_Scn | 245 | hRNU12 | Scn2a | hRNU1-3 | 1.44 | 1.14 | 1.40 | 1.32 | 0.16 | 0.02 |
| 2aB10_hRNU1-3 | | | B10 | | | | | | | |
| 243_hRNU12_Scn | 243 | hRNU12 | Scn2a | hRNU1-1 | 1.54 | 1.10 | 1.37 | 1.34 | 0.22 | 0.02 |
| 2aB10_hRNU1-1 | | | B10 | | | | | | | |
| 235_hRNU11_Scn | 235 | hRNU11 | Scn2a | mRnu2-10 | 1.20 | 1.71 | 1.15 | 1.35 | 0.31 | 0.01 |
| 2aB10_mRnu2-10 | | | B10 | | | | | | | |
| 204_RNU7- | 204 | RNU7-1 | Scn2a | hRNU6-1 | 1.32 | 1.5 | 1.18 | 1.35 | 0.19 | 0.01 |
| 1_Scn2aB10_hRNU6-1 | | | B10 | | | | | | | |
| 208_RNU7- | 208 | RNU7-1 | Scn2a | hRN7SK | 1.46 | 1.39 | 1.21 | 1.35 | 0.13 | 0.01 |
| 1_Scn2aB10_hRN7SK | | | B10 | | | | | | | |
| 288_hRN7SK_Scn | 288 | hRN7SK | Scn2a | mRn7sk | 1.49 | 1.03 | 1.65 | 1.39 | 0.32 | 0.007 |
| 2aB10_mRn7sk | | | B10 | | | | | | | |
| 239_hRNU11_Scn | 239 | hRNU11 | Scn2a | mRnu7 | 1.49 | 1.42 | 1.27 | 1.39 | 0.11 | 0.006 |
| 2aB10_mRnu7 | | | B10 | | | | | | | |
| 300_mRnu1a1_Sc | 300 | mRnu1a1 | Scn2a | hRNU6-1 | 1.35 | 1.53 | 1.31 | 1.40 | 0.12 | 0.006 |
| n2aB10_hRNU6-1 | | | B10 | | | | | | | |
| 240_hRNU11_Scn | 240 | hRNU11 | Scn2a | mRnu11 | 1.23 | 1.57 | 1.50 | 1.43 | 0.18 | 0.003 |
| 2aB10_mRnu11 | | | B10 | | | | | | | |
| 218_RNU7- | 218 | RNU7-1 | Scn2a | mRnu12 | 1.72 | 1.31 | 1.29 | 1.44 | 0.24 | 0.003 |
| 1_Scn2aB10_mRnu12 | | | B10 | | | | | | | |
| 234_hRNU11_Scn | 234 | hRNU11 | Scn2a | mRnu1b6 | 1.61 | 1.43 | 1.30 | 1.45 | 0.16 | 0.002 |
| 2aB10_mRnu1b6 | | | B10 | | | | | | | |
| 214_RNU7- | 214 | RNU7-1 | Scn2a | mRnu5g | 1.25 | 1.63 | 1.46 | 1.45 | 0.19 | 0.002 |
| 1_Scn2aB10_mRnu5g | | | B10 | | | | | | | |
| 269_hRN7SK_Scn | 269 | hRN7SK | Scn2a | hRNU2-1 | 1.53 | 1.36 | 1.46 | 1.45 | 0.09 | 0.002 |
| 2aB10_hRNU2-1 | | | B10 | | | | | | | |
| 212_RNU7- | 212 | RNU7-1 | Scn2a | mRnu2-10 | 1.33 | 1.83 | 1.21 | 1.46 | 0.33 | 0.002 |
| 1_Scn2aB10_mRnu2-10 | | | B10 | | | | | | | |
| 260_hRNU12_Scn | 260 | hRNU12 | Scn2a | mRnu5g | 1.28 | 1.91 | 1.21 | 1.47 | 0.39 | 0.002 |
| 2aB10_mRnu5g | | | B10 | | | | | | | |
| 219_RNU7- | 219 | RNU7-1 | Scn2a | mRn7sk | 1.80 | 1.21 | 1.39 | 1.47 | 0.30 | 0.002 |
| 1_Scn2aB10_mRn7sk | | | B10 | | | | | | | |
| 236_hRNU11_Scn | 236 | hRNU11 | Scn2a | mRnu3b1 | 1.46 | 1.57 | 1.38 | 1.47 | 0.10 | 0.001 |
| 2aB10_mRnu3b1 | | | B10 | | | | | | | |
| 228_hRNU11_Scn | 228 | hRNU11 | Scn2a | RNU7-1 | 1.34 | 1.61 | 1.49 | 1.48 | 0.14 | 0.001 |
| 2aB10_RNU7-1 | | | B10 | | | | | | | |
| 241_hRNU11_Scn | 241 | hRNU11 | Scn2a | mRnu12 | 1.39 | 1.63 | 1.43 | 1.49 | 0.13 | 0.001 |
| 2aB10_mRnu12 | | | B10 | | | | | | | |
| 237_hRNU11_Scn | 237 | hRNU11 | Scn2a | mRnu5g | 1.67 | 1.30 | 1.51 | 1.49 | 0.19 | <0.001 |
| 2aB10_mRnu5g | | | B10 | | | | | | | |
| 206_RNU7- | 206 | RNU7-1 | Scn2a | hRNU11 | 1.46 | 1.53 | 1.50 | 1.50 | 0.04 | <0.001 |
| 1_Scn2aB10_hRNU11 | | | B10 | | | | | | | |
| 217_RNU7- | 217 | RNU7-1 | Scn2a | mRnu11 | 1.40 | 1.77 | 1.41 | 1.53 | 0.21 | <0.001 |
| 1_Scn2aB10_mRnu11 | | | B10 | | | | | | | |
| 229_hRNU11_Scn | 229 | hRNU11 | Scn2a | hRNU11 | 1.44 | 1.78 | 1.43 | 1.55 | 0.20 | <0.001 |
| 2aB10_hRNU11 | | | B10 | | | | | | | |
| 233_hRNU11_Scn | 233 | hRNU11 | Scn2a | mRnu1b1 | 1.42 | 1.79 | 1.54 | 1.58 | 0.19 | <0.001 |
| 2aB10_mRnu1b1 | | | B10 | | | | | | | |
| 296_mRnu1a1_Sc | 296 | mRnu1a1 | Scn2a | hRNU2-1 | 1.49 | 1.88 | 1.39 | 1.59 | 0.26 | <0.001 |
| n2aB10_hRNU2-1 | | | B10 | | | | | | | |
| 211_RNU7- | 211 | RNU7-1 | Scn2a | mRnu1b6 | 1.70 | 1.32 | 1.76 | 1.59 | 0.24 | <0.001 |
| 1_Scn2aB10_mRnu1b6 | | | B10 | | | | | | | |
| 202_RNU7- | 202 | RNU7-1 | Scn2a | hRNU4-1 | 1.28 | 1.69 | 1.84 | 1.60 | 0.29 | <0.001 |
| 1_Scn2aB10_hRNU4-1 | | | B10 | | | | | | | |
| 244_hRNU12_Scn | 244 | hRNU12 | Scn2a | hRNU1-2 | 1.59 | 1.54 | 1.70 | 1.61 | 0.08 | <0.001 |
| 2aB10_hRNU1-2 | | | B10 | | | | | | | |
| 223_hRNU11_Scn | 223 | hRNU11 | Scn2a | hRNU2-1 | 1.71 | 1.56 | 1.64 | 1.63 | 0.07 | <0.001 |
| 2aB10_hRNU2-1 | | | B10 | | | | | | | |
| 209_RNU7- | 209 | RNU7-1 | Scn2a | mRnu1a1 | 1.40 | 1.80 | 1.76 | 1.65 | 0.22 | <0.001 |
| 1_Scn2aB10_mRnu1a1 | | | B10 | | | | | | | |
| 225_hRNU11_Scn | 225 | hRNU11 | Scn2a | hRNU4-1 | 1.43 | 1.51 | 2.04 | 1.66 | 0.33 | <0.001 |
| 2aB10_hRNU4-1 | | | B10 | | | | | | | |
| 230_hRNU11_Scn | 230 | hRNU11 | Scn2a | hRNU12 | 1.49 | 1.53 | 2.01 | 1.67 | 0.29 | <0.001 |
| 2aB10_hRNU12 | | | B10 | | | | | | | |
| 293_mRnu1a1_Sc | 293 | mRnu1a1 | Scn2a | hRNU1-1 | 1.42 | 1.87 | 1.74 | 1.68 | 0.23 | <0.001 |
| n2aB10_hRNU1-1 | | | B10 | | | | | | | |
| 294_mRnu1a1_Sc | 294 | mRnu1a1 | Scn2a | hRNU1-2 | 1.78 | 1.49 | 1.82 | 1.70 | 0.18 | <0.001 |
| n2aB10_hRNU1-2 | | | B10 | | | | | | | |
| 291_mu1a1_Scn2a | 291 | mu1a1 | Scn2a | U1 | 1.78 | 1.85 | 1.50 | 1.71 | 0.19 | <0.001 |
| D12_U1 | | | D12 | | | | | | | |
| 216_RNU7- | 216 | RNU7-1 | Scn2a | mRnu7 | 1.62 | 1.53 | 2.02 | 1.72 | 0.26 | <0.001 |
| 1_Scn2aB10_mRnu7 | | | B10 | | | | | | | |
| 221_hRNU11_Scn | 221 | hRNU11 | Scn2a | hRNU1-2 | 1.83 | 1.75 | 1.59 | 1.72 | 0.12 | <0.001 |
| 2aB10_hRNU1-2 | | | B10 | | | | | | | |
| 297_mRnu1a1_Sc | 297 | mRnu1a1 | Scn2a | hU3 | 1.88 | 1.60 | 1.69 | 1.72 | 0.14 | <0.001 |
| n2aB10_hU3 | | | B10 | | | | | | | |
| 299_mRnu1a1_Sc | 299 | mRnu1a1 | Scn2a | hRNU5A-1 | 2.06 | 1.68 | 1.49 | 1.74 | 0.29 | <0.001 |
| n2aB10_hRNU5A-1 | | | B10 | | | | | | | |
| 222_hRNU11_Scn | 222 | hRNU11 | Scn2a | hRNU1-3 | 1.55 | 2.06 | 1.72 | 1.78 | 0.26 | <0.001 |
| 2aB10_hRNU1-3 | | | B10 | | | | | | | |
| 232_hRNU11_Scn | 232 | hRNU11 | Scn2a | mRnu1a1 | 2.24 | 1.62 | 1.54 | 1.80 | 0.38 | <0.001 |
| 2aB10_mRnu1a1 | | | B10 | | | | | | | |
| 298_mRnu1a1_Sc | 298 | mRnu1a1 | Scn2a | hRNU4-1 | 2.06 | 1.52 | 1.99 | 1.86 | 0.29 | <0.001 |
| n2aB10_hRNU4-1 | | | B10 | | | | | | | |
| 226_hRNU11_Scn | 226 | hRNU11 | Scn2a | hRNU5A-1 | 2.03 | 1.74 | 1.79 | 1.86 | 0.16 | <0.001 |
| 2aB10_hRNU5A-1 | | | B10 | | | | | | | |
| 224_hRNU11_Scn | 224 | hRNU11 | Scn2a | hU3 | 1.75 | 2.06 | 1.87 | 1.89 | 0.15 | <0.001 |
| 2aB10_hU3 | | | B10 | | | | | | | |
| 220_hRNU11_Scn | 220 | hRNU11 | Scn2a | hRNU1-1 | 2.11 | 1.79 | 1.77 | 1.89 | 0.19 | <0.001 |
| 2aB10_hRNU1-1 | | | B10 | | | | | | | |
| 295_mRnu1a1_Sc | 295 | mRnu1a1 | Scn2a | hRNU1-3 | 2.09 | 2.21 | 1.51 | 1.93 | 0.38 | <0.001 |
| n2aB10_hRNU1-3 | | | B10 | | | | | | | |
| 301_mRnu1a1_Sc | 301 | mRnu1a1 | Scn2a | RNU7-1 | 2.03 | 1.95 | 1.82 | 1.94 | 0.11 | <0.001 |
| n2aB10_RNU7-1 | | | B10 | | | | | | | |
| 203_RNU7- | 203 | RNU7-1 | Scn2a | hRNU5A-1 | 2.54 | 2.11 | 1.78 | 2.14 | 0.38 | <0.001 |
| 1_Scn2aB10_hRN | | | B10 | | | | | | | |
| U5A-1 | | | | | | | | | | |

TABLE 14
Library 4 Summary

| | | | | | New | New | New | | | P-value |
|---|---|---|---|---|---|---|---|---|---|---|
| Name | ID | Promoter | U7 | Terminator | 4-1 | 4-2 | 4-3 | Average | SD | (ANOVA) |
| 347_mRnu1b6_ | 347 | mRnu1b6 | Scn2a | RNU7-1 | 1.09 | 0.81 | 0.86 | 0.92 | 0.15 | 0.64 |
| Scn2aB10_R | | | B10 | | | | | | | |
| NU7-1 | | | | | | | | | | |
| 385_mu1a1_S | 385 | mu1a1 | Scn2a | U1 | 1.01 | 0.90 | 1.09 | 1.00 | 0.09 | Control |
| cn2aF1Scr2_U1 | | | F1Scr2 | | | | | | | |
| 386_mu1a1_S | 386 | mu1a1 | Scr2 | U1 | 0.99 | 1.10 | 0.91 | 1.00 | 0.09 | >0.99 |
| cr2_U1 | | | | | | | | | | |
| 327_mRnu1b1_ | 327 | mRnu1b1 | Scn2a | hRN7SK | 1.31 | 1.16 | 1.19 | 1.22 | 0.08 | 0.2 |
| Scn2aB10_h | | | B10 | | | | | | | |
| RN7SK | | | | | | | | | | |
| 346_mRnu1b6_ | 346 | mRnu1b6 | Scn2a | hRNU6-1 | 1.32 | 1.24 | 1.12 | 1.22 | 0.10 | 0.18 |
| Scn2aB10_h | | | B10 | | | | | | | |
| RNU6-1 | | | | | | | | | | |
| 338_mRnu1b1_ | 338 | mRnu1b1 | Scn2a | mRn7sk | 1.48 | 1.04 | 1.35 | 1.29 | 0.23 | 0.09 |
| Scn2aB10_m | | | B10 | | | | | | | |
| Rn7sk | | | | | | | | | | |
| 323_mRnu1b1_ | 323 | mRnu1b1 | Scn2a | hRNU6-1 | 1.44 | 1.03 | 1.47 | 1.31 | 0.24 | 0.07 |
| Scn2aB10_h | | | B10 | | | | | | | |
| RNU6-1 | | | | | | | | | | |
| 355_mRnu1b6_ | 355 | mRnu1b6 | Scn2a | mRnu3b1 | 0.87 | 2.13 | 1.01 | 1.34 | 0.69 | 0.05 |
| Scn2aB10_m | | | B10 | | | | | | | |
| Rnu3b1 | | | | | | | | | | |
| 332_mRnu1b1_ | 332 | mRnu1b1 | Scn2a | mRnu3b1 | 1.51 | 1.10 | 1.40 | 1.34 | 0.21 | 0.05 |
| Scn2aB10_m | | | B10 | | | | | | | |
| Rnu3b1 | | | | | | | | | | |
| 356_mRnu1b6_ | 356 | mRnu1b6 | Scn2a | mRnu5g | 1.68 | 0.91 | 1.44 | 1.34 | 0.39 | 0.04 |
| Scn2aB10_m | | | B10 | | | | | | | |
| Rnu5g | | | | | | | | | | |
| 350_mRnu1b6_ | 350 | mRnu1b6 | Scn2a | hRN7SK | 1.40 | 1.33 | 1.44 | 1.39 | 0.06 | 0.02 |
| Scn2aB10_h | | | B10 | | | | | | | |
| RN7SK | | | | | | | | | | |
| 309_mRnu1a1_ | 309 | mRnu1a1 | Scn2a | mRnu3b1 | 1.55 | 1.2 | 1.39 | 1.39 | 0.16 | 0.02 |
| Scn2aB10_m | | | B10 | | | | | | | |
| Rnu3b1 | | | | | | | | | | |
| 384_mRnu2- | 384 | mRnu2-10 | Scn2a | mRn7sk | 1.58 | 1.28 | 1.40 | 1.42 | 0.15 | 0.01 |
| 10_Scn2aB10_ | | | B10 | | | | | | | |
| mRn7sk | | | | | | | | | | |
| 315_mRnu1a1_ | 315 | mRnu1a1 | Scn2a | mRn7sk | 1.57 | 1.11 | 1.59 | 1.42 | 0.27 | 0.01 |
| Scn2aB10_m | | | B10 | | | | | | | |
| Rn7sk | | | | | | | | | | |
| 319_mRnu1b1_ | 319 | mRnu1b1 | Scn2a | hRNU2-1 | 1.42 | 1.33 | 1.53 | 1.43 | 0.10 | 0.01 |
| Scn2aB10_h | | | B10 | | | | | | | |
| RNU2-1 | | | | | | | | | | |
| 378_mRnu2- | 378 | mRnu2-10 | Scn2a | mRnu3b1 | 1.56 | 1.25 | 1.54 | 1.45 | 0.17 | 0.008 |
| 10_Scn2aB10_ | | | B10 | | | | | | | |
| mRnu3b1 | | | | | | | | | | |
| 337_mRnu1b1_ | 337 | mRnu1b1 | Scn2a | mRnu12 | 1.59 | 1.27 | 1.55 | 1.47 | 0.18 | 0.006 |
| Scn2aB10_m | | | B10 | | | | | | | |
| Rnu12 | | | | | | | | | | |
| 400_mRnu3b1_ | 400 | mRnu3b1 | Scn2a | hRN7SK | 1.74 | 1.34 | 1.35 | 1.48 | 0.23 | 0.005 |
| Scn2aB10_h | | | B10 | | | | | | | |
| RN7SK | | | | | | | | | | |
| 324_mRnu1b1_ | 324 | mRnu1b1 | Scn2a | RNU7-1 | 1.57 | 1.29 | 1.59 | 1.48 | 0.17 | 0.005 |
| Scn2aB10_R | | | B10 | | | | | | | |
| NU7-1 | | | | | | | | | | |
| 316_mRnu1b1_ | 316 | mRnu1b1 | Scn2a | hRNU1-1 | 1.56 | 1.49 | 1.41 | 1.49 | 0.07 | 0.004 |
| Scn2aB10_h | | | B10 | | | | | | | |
| RNU1-1 | | | | | | | | | | |
| 351_mRnu1b6_ | 351 | mRnu1b6 | Scn2a | mRnu1a1 | 1.24 | 1.55 | 1.68 | 1.49 | 0.23 | 0.004 |
| Scn2aB10_m | | | B10 | | | | | | | |
| Rnu1a1 | | | | | | | | | | |
| 354_mRnu1b6_ | 354 | mRnu1b6 | Scn2a | mRnu2-10 | 1.62 | 1.40 | 1.50 | 1.50 | 0.11 | 0.003 |
| Scn2aB10_m | | | B10 | | | | | | | |
| Rnu2-10 | | | | | | | | | | |
| 331_mRnu1b1_ | 331 | mRnu1b1 | Scn2a | mRnu2-10 | 1.7 | 1.42 | 1.50 | 1.55 | 0.15 | 0.002 |
| Scn2aB10_m | | | B10 | | | | | | | |
| Rnu2-10 | | | | | | | | | | |
| 373_mRnu2- | 373 | mRnu2-10 | Scn2a | hRN7SK | 1.66 | 1.3 | 1.70 | 1.56 | 0.22 | 0.001 |
| 10_Scn2aB10_ | | | B10 | | | | | | | |
| hRN7SK | | | | | | | | | | |
| 317_mRnu1b1_ | 317 | mRnu1b1 | Scn2a | hRNU1-2 | 1.93 | 1.38 | 1.42 | 1.57 | 0.31 | <0.001 |
| Scn2aB10_h | | | B10 | | | | | | | |
| RNU1-2 | | | | | | | | | | |
| 361_mRnu1b6_ | 361 | mRnu1b6 | Scn2a | mRn7sk | 1.85 | 1.29 | 1.61 | 1.58 | 0.28 | <0.001 |
| Scn2aB10_m | | | B10 | | | | | | | |
| Rn7sk | | | | | | | | | | |
| 387_mu1a1_S | 387 | mu1a1 | Scn2a | U1 | 1.74 | 1.41 | 1.64 | 1.60 | 0.17 | <0.001 |
| cn2aD 12_U1 | | | D12 | | | | | | | |
| 325_mRnu1b1_ | 325 | mRnu1b1 | Scn2a | hRNU11 | 1.77 | 1.38 | 1.66 | 1.60 | 0.20 | <0.001 |
| Scn2aB10_h | | | B10 | | | | | | | |
| RNU11 | | | | | | | | | | |
| 304_mRnu1a1_ | 304 | mRnu1a1 | Scn2a | hRN7SK | 1.65 | 1.39 | 1.77 | 1.60 | 0.19 | <0.001 |
| Scn2aB10_h | | | B10 | | | | | | | |
| RN7SK | | | | | | | | | | |
| 396_mRnu3b1_ | 396 | mRnu3b1 | Scn2a | hRNU6-1 | 1.68 | 1.37 | 1.80 | 1.61 | 0.22 | <0.001 |
| Scn2aB10_h | | | B10 | | | | | | | |
| RNU6-1 | | | | | | | | | | |
| 342_mRnu1b6_ | 342 | mRnu1b6 | Scn2a | hRNU2-1 | 1.86 | 1.25 | 1.74 | 1.62 | 0.32 | <0.001 |
| Scn2aB10_h | | | B10 | | | | | | | |
| RNU2-1 | | | | | | | | | | |
| 381_mRnu2- | 381 | mRnu2-10 | Scn2a | mRnu7 | 1.72 | 1.41 | 1.73 | 1.62 | 0.18 | <0.001 |
| 10_Scn2aB10_ | | | B10 | | | | | | | |
| mRnu7 | | | | | | | | | | |
| 369_mRnu2- | 369 | mRnu2-10 | Scn2a | hRNU6-1 | 1.66 | 1.52 | 1.70 | 1.63 | 0.10 | <0.001 |
| 10_Scn2aB10_ | | | B10 | | | | | | | |
| hRNU6-1 | | | | | | | | | | |
| 335_mRnu1b1_ | 335 | mRnu1b1 | Scn2a | mRnu7 | 1.87 | 1.50 | 1.56 | 1.64 | 0.20 | <0.001 |
| Scn2aB10_m | | | B10 | | | | | | | |
| Rnu7 | | | | | | | | | | |
| 330_mRnu1b1_ | 330 | mRnu1b1 | Scn2a | mRnu1b6 | 1.89 | 1.54 | 1.52 | 1.65 | 0.21 | <0.001 |
| Scn2aB10_m | | | B10 | | | | | | | |
| Rnu1b6 | | | | | | | | | | |
| 352_mRnu1b6_ | 352 | mRnu1b6 | Scn2a | mRnu1b1 | 1.69 | 1.54 | 1.76 | 1.66 | 0.1 | <0.001 |
| Scn2aB10_m | | | B10 | | | | | | | |
| Rnu1b1 | | | | | | | | | | |
| 382_mRnu2- | 382 | mRnu2-10 | Scn2a | mRnu11 | 1.94 | 1.4 | 1.66 | 1.67 | 0.27 | <0.001 |
| 10_Scn2aB10_ | | | B10 | | | | | | | |
| mRnu11 | | | | | | | | | | |
| 344_mRnu1b6_ | 344 | mRnu1b6 | Scn2a | hRNU4-1 | 0.99 | 1.58 | 2.44 | 1.67 | 0.73 | <0.001 |
| Scn2aB10_h | | | B10 | | | | | | | |
| RNU4-1 | | | | | | | | | | |
| 336_mRnu1b1_ | 336 | mRnu1b1 | Scn2a | mRnu11 | 1.89 | 1.41 | 1.74 | 1.68 | 0.25 | <0.001 |
| Scn2aB10_m | | | B10 | | | | | | | |
| Rnu11 | | | | | | | | | | |
| 371_mRnu2- | 371 | mRnu2-10 | Scn2a | hRNU11 | 1.87 | 1.55 | 1.62 | 1.68 | 0.17 | <0.001 |
| 10_Scn2aB10_ | | | B10 | | | | | | | |
| hRNU11 | | | | | | | | | | |
| 326_mRnu1b1_ | 326 | mRnu1b1 | Scn2a | hRNU12 | 1.43 | 1.89 | 1.82 | 1.71 | 0.24 | <0.001 |
| Scn2aB10_h | | | B10 | | | | | | | |
| RNU12 | | | | | | | | | | |
| 343_mRnu1b6_ | 343 | mRnu1b6 | Scn2a | hU3 | 2.11 | 1.39 | 1.65 | 1.72 | 0.36 | <0.001 |
| Scn2aB10_h | | | B10 | | | | | | | |
| U3 | | | | | | | | | | |
| 318_mRnu1b1_ | 318 | mRnu1b1 | Scn2a | hRNU1-3 | 1.84 | 1.63 | 1.69 | 1.72 | 0.11 | <0.001 |
| Scn2aB10_h | | | B10 | | | | | | | |
| RNU1-3 | | | | | | | | | | |
| 358_mRnu1b6_ | 358 | mRnu1b6 | Scn2a | mRnu7 | 1.88 | 1.56 | 1.75 | 1.73 | 0.16 | <0.001 |
| Scn2aB10_m | | | B10 | | | | | | | |
| Rnu7 | | | | | | | | | | |
| 383_mRnu2- | 383 | mRnu2-10 | Scn2a | mRnu12 | 2.04 | 1.43 | 1.73 | 1.73 | 0.31 | <0.001 |
| 10_Scn2aB10_ | | | B10 | | | | | | | |
| mRnu12 | | | | | | | | | | |
| 308_mRnu1a1_ | 308 | mRnu1a1 | Scn2a | mRnu2-10 | 1.71 | 1.65 | 1.84 | 1.73 | 0.10 | <0.001 |
| Scn2aB10_m | | | B10 | | | | | | | |
| Rnu2-10 | | | | | | | | | | |
| 376_mRnu2- | 376 | mRnu2-10 | Scn2a | mRnu1b6 | 1.94 | 1.5 | 1.70 | 1.74 | 0.19 | <0.001 |
| 10_Scn2aB10_ | | | B10 | | | | | | | |
| mRnu1b6 | | | | | | | | | | |
| 370_mRnu2- | 370 | mRnu2-10 | Scn2a | RNU7-1 | 1.88 | 1.49 | 1.84 | 1.74 | 0.21 | <0.001 |
| 10_Scn2aB10_ | | | B10 | | | | | | | |
| RNU7-1 | | | | | | | | | | |
| 333_mRnu1b1_ | 333 | mRnu1b1 | Scn2a | mRnu5g | 2.13 | 1.39 | 1.73 | 1.75 | 0.37 | <0.001 |
| Scn2aB10_m | | | B10 | | | | | | | |
| Rnu5g | | | | | | | | | | |
| 366_mRnu2- | 366 | mRnu2-10 | Scn2a | hU3 | 1.88 | 1.63 | 1.76 | 1.76 | 0.13 | <0.001 |
| 10_Scn2aB10_ | | | B10 | | | | | | | |
| hU3 | | | | | | | | | | |
| 321_mRnu1b1_ | 321 | mRnu1b1 | Scn2a | hRNU4-1 | 1.99 | 1.55 | 1.74 | 1.76 | 0.22 | <0.001 |
| Scn2aB10_h | | | B10 | | | | | | | |
| RNU4-1 | | | | | | | | | | |
| 314_mRnu1a1_ | 314 | mRnu1a1 | Scn2a | mRnu12 | 1.79 | 1.79 | 1.71 | 1.77 | 0.04 | <0.001 |
| Scn2aB10_m | | | B10 | | | | | | | |
| Rnu12 | | | | | | | | | | |
| 389_mRnu3b1_ | 389 | mRnu3b1 | Scn2a | hRNU1-1 | 1.87 | 1.76 | 1.75 | 1.79 | 0.07 | <0.001 |
| Scn2aB10_h | | | B10 | | | | | | | |
| RNU1-1 | | | | | | | | | | |
| 302_mRnu1a1_ | 302 | mRnu1a1 | Scn2a | hRNU11 | 1.73 | 1.91 | 1.75 | 1.80 | 0.10 | <0.001 |
| Scn2aB10_h | | | B10 | | | | | | | |
| RNU11 | | | | | | | | | | |
| 393_mRnu3b1_ | 393 | mRnu3b1 | Scn2a | hU3 | 1.86 | 1.95 | 1.59 | 1.80 | 0.18 | <0.001 |
| Scn2aB10_h | | | B10 | | | | | | | |
| U3 | | | | | | | | | | |
| 320_mRnu1b1_ | 320 | mRnu1b1 | Scn2a | hU3 | 2.01 | 1.67 | 1.73 | 1.80 | 0.18 | <0.001 |
| Scn2aB10_h | | | B10 | | | | | | | |
| U3 | | | | | | | | | | |
| 364_mRnu2- | 364 | mRnu2-10 | Scn2a | hRNU1-3 | 1.86 | 1.66 | 1.91 | 1.81 | 0.13 | <0.001 |
| 10_Scn2aB10_ | | | B10 | | | | | | | |
| hRNU1-3 | | | | | | | | | | |
| 399_mRnu3b1_ | 399 | mRnu3b1 | Scn2a | hRNU12 | 1.96 | 1.58 | 1.88 | 1.81 | 0.20 | <0.001 |
| Scn2aB10_h | | | B10 | | | | | | | |
| RNU12 | | | | | | | | | | |
| 365_mRnu2- | 365 | mRnu2-10 | Scn2a | hRNU2-1 | 1.97 | 1.61 | 1.86 | 1.81 | 0.19 | <0.001 |
| 10_Scn2aB10_ | | | B10 | | | | | | | |
| hRNU2-1 | | | | | | | | | | |
| 360_mRnu1b6_ | 360 | mRnu1b6 | Scn2a | mRnu12 | 2.13 | 1.60 | 1.71 | 1.81 | 0.28 | <0.001 |
| Scn2aB10_m | | | B10 | | | | | | | |
| Rnu12 | | | | | | | | | | |
| 349_mRnu1b6_ | 349 | mRnu1b6 | Scn2a | hRNU12 | 2.05 | 1.49 | 1.91 | 1.82 | 0.29 | <0.001 |
| Scn2aB10_h | | | B10 | | | | | | | |
| RNU12 | | | | | | | | | | |
| 322_mRnu1b1_ | 322 | mRnu1b1 | Scn2a | hRNU5A-1 | 2.57 | 1.59 | 1.29 | 1.82 | 0.67 | <0.001 |
| Scn2aB10_h | | | B10 | | | | | | | |
| RNU5A-1 | | | | | | | | | | |
| 397_mRnu3b1_ | 397 | mRnu3b1 | Scn2a | RNU7-1 | 1.90 | 1.83 | 1.75 | 1.83 | 0.07 | <0.001 |
| Scn2aB10_R | | | B10 | | | | | | | |
| NU7-1 | | | | | | | | | | |
| 363_mRnu2- | 363 | mRnu2-10 | Scn2a | hRNU1-2 | 2.10 | 1.55 | 1.86 | 1.83 | 0.27 | <0.001 |
| 10_Scn2aB10_ | | | B10 | | | | | | | |
| hRNU1-2 | | | | | | | | | | |
| 375_mRnu2- | 375 | mRnu2-10 | Scn2a | mRnu1b1 | 1.86 | 1.64 | 2.00 | 1.84 | 0.18 | <0.001 |
| 10_Scn2aB10_ | | | B10 | | | | | | | |
| mRnu1b1 | | | | | | | | | | |
| 310_mRnu1a1_ | 310 | mRnu1a1 | Scn2a | mRnu5g | 1.81 | 1.67 | 2.03 | 1.84 | 0.18 | <0.001 |
| Scn2aB10_m | | | B10 | | | | | | | |
| Rnu5g | | | | | | | | | | |
| 305_mRnu1a1_ | 305 | mRnu1a1 | Scn2a | mRnu1a1 | 1.87 | 1.74 | 1.90 | 1.84 | 0.09 | <0.001 |
| Scn2aB10_m | | | B10 | | | | | | | |
| Rnu1a1 | | | | | | | | | | |
| 306_mRnu1a1_ | 306 | mRnu1a1 | Scn2a | mRnu1b1 | 1.98 | 1.90 | 1.66 | 1.85 | 0.17 | <0.001 |
| Scn2aB10_m | | | B10 | | | | | | | |
| Rnu1b1 | | | | | | | | | | |
| 391_mRnu3b1_ | 391 | mRnu3b1 | Scn2a | hRNU1-3 | 1.96 | 1.76 | 1.88 | 1.87 | 0.10 | <0.001 |
| Scn2aB10_h | | | B10 | | | | | | | |
| RNU1-3 | | | | | | | | | | |
| 339_mRnu1b6_ | 339 | mRnu1b6 | Scn2a | hRNU1-1 | 2.02 | 1.62 | 1.95 | 1.87 | 0.21 | <0.001 |
| Scn2aB10_h | | | B10 | | | | | | | |
| RNU1-1 | | | | | | | | | | |
| 341_mRnu1b6_ | 341 | mRnu1b6 | Scn2a | hRNU1-3 | 2.19 | 1.55 | 1.86 | 1.87 | 0.32 | <0.001 |
| Scn2aB10_h | | | B10 | | | | | | | |
| RNU1-3 | | | | | | | | | | |
| 307_mRnu1a1_ | 307 | mRnu1a1 | Scn2a | mRnu1b6 | 1.59 | 1.98 | 2.05 | 1.8″ | 0.25 | <0.001 |
| Scn2aB10_m | | | B10 | | | | | | | |
| Rnu1b6 | | | | | | | | | | |
| 392_mRnu3b1_ | 392 | mRnu3b1 | Scn2a | hRNU2-1 | 2.08 | 1.62 | 1.93 | 1.88 | 0.24 | <0.001 |
| Scn2aB10_h | | | B10 | | | | | | | |
| RNU2-1 | | | | | | | | | | |
| 367_mRnu2- | 367 | mRnu2-10 | Scn2a | hRNU4-1 | 2.19 | 1.66 | 1.79 | 1.88 | 0.28 | <0.001 |
| 10_Scn2aB10_ | | | B10 | | | | | | | |
| hRNU4-1 | | | | | | | | | | |
| 312_mRnu1a1_ | 312 | mRnu1a1 | Scn2a | mRnu7 | 2.34 | 1.69 | 1.69 | 1.91 | 0.37 | <0.001 |
| Scn2aB10_m | | | B10 | | | | | | | |
| Rnu7 | | | | | | | | | | |
| 328_mRnu1b1_ | 328 | mRnu1b1 | Scn2a | mRnu1a1 | 2.35 | 1.72 | 1.65 | 1.91 | 0.39 | <0.001 |
| Scn2aB10_m | | | B10 | | | | | | | |
| Rnu1a1 | | | | | | | | | | |
| 388_mu1a1_S | 388 | mu1a1 | Scn2a | U1 | 2.19 | 1.70 | 1.86 | 1.92 | 0.25 | <0.001 |
| cn2aB10_U1 | | | B10 | | | | | | | |
| 348_mRnu1b6_ | 348 | mRnu1b6 | Scn2a | hRNU11 | 2.10 | 1.74 | 2.03 | 1.95 | 0.19 | <0.001 |
| Scn2aB10_h | | | B10 | | | | | | | |
| RNU11 | | | | | | | | | | |
| 401_mRnu3b1_ | 401 | mRnu3b1 | Scn2a | mRnu1a1 | 2.15 | 1.73 | 1.98 | 1.96 | 0.21 | <0.001 |
| Scn2aB10_m | | | B10 | | | | | | | |
| Rnu1a1 | | | | | | | | | | |
| 340_mRnu1b6_ | 340 | mRnu1b6 | Scn2a | hRNU1-2 | 2.09 | 1.67 | 2.12 | 1.96 | 0.25 | <0.001 |
| Scn2aB10_h | | | B10 | | | | | | | |
| RNU1-2 | | | | | | | | | | |
| 362_mRnu2- | 362 | mRnu2-10 | Scn2a | hRNU1-1 | 2.40 | 1.73 | 1.77 | 1.97 | 0.38 | <0.001 |
| 10_Scn2aB10_ | | | B10 | | | | | | | |
| hRNU1-1 | | | | | | | | | | |
| 359_mRnu1b6_ | 359 | mRnu1b6 | Scn2a | mRnu11 | 2.10 | 1.74 | 2.11 | 1.98 | 0.21 | <0.001 |
| Scn2aB10_m | | | B10 | | | | | | | |
| Rnu11 | | | | | | | | | | |
| 353_mRnu1b6_ | 353 | mRnu1b6 | Scn2a | mRnu1b6 | 2.22 | 1.72 | 2.00 | 1.98 | 0.25 | <0.001 |
| Scn2aB10_m | | | B10 | | | | | | | |
| Rnu1b6 | | | | | | | | | | |
| 329_mRnu1b1_ | 329 | mRnu1b1 | Scn2a | mRnu1b1 | 2.25 | 1.79 | 1.93 | 1.99 | 0.24 | <0.001 |
| Scn2aB10_m | | | B10 | | | | | | | |
| Rnu1b1 | | | | | | | | | | |
| 303_mRnu1a1_ | 303 | mRnu1a1 | Scn2a | hRNU12 | 2.04 | 1.81 | 2.23 | 2.03 | 0.21 | <0.001 |
| Scn2aB10_h | | | B10 | | | | | | | |
| RNU12 | | | | | | | | | | |
| 377_mRnu2- | 377 | mRnu2-10 | Scn2a | mRnu2-10 | 2.08 | 1.88 | 2.12 | 2.03 | 0.13 | <0.001 |
| 10_Scn2aB10_ | | | B10 | | | | | | | |
| mRnu2-10 | | | | | | | | | | |
| 313_mRnu1a1_ | 313 | mRnu1a1 | Scn2a | mRnu11 | 2.34 | 1.74 | 2.03 | 2.04 | 0.30 | <0.001 |
| Scn2aB10_m | | | B10 | | | | | | | |
| Rnu11 | | | | | | | | | | |
| 345_mRnu1b6_ | 345 | mRnu1b6 | Scn2a | hRNU5A-1 | 2.23 | 1.91 | 2.07 | 2.07 | 0.16 | <0.001 |
| Scn2aB10_h | | | B10 | | | | | | | |
| RNU5A-1 | | | | | | | | | | |
| 394_mRnu3b1_ | 394 | mRnu3b1 | Scn2a | hRNU4-1 | 2.25 | 1.92 | 2.08 | 2.08 | 0.16 | <0.001 |
| Scn2aB10_h | | | B10 | | | | | | | |
| RNU4-1 | | | | | | | | | | |
| 368_mRnu2- | 368 | mRnu2-10 | Scn2a | hRNU5A-1 | 2.50 | 1.93 | 1.86 | 2.10 | 0.35 | <0.001 |
| 10_Scn2aB10_ | | | B10 | | | | | | | |
| hRNU5A-1 | | | | | | | | | | |
| 374_mRnu2- | 374 | mRnu2-10 | Scn2a | mRnu1a1 | 2.25 | 1.72 | 2.39 | 2.12 | 0.36 | <0.001 |
| 10_Scn2aB10_ | | | B10 | | | | | | | |
| mRnu1a1 | | | | | | | | | | |
| 398_mRnu3b1_ | 398 | mRnu3b1 | Scn2a | hRNU11 | 2.18 | 2.14 | 2.07 | 2.13 | 0.06 | <0.001 |
| Scn2aB10_h | | | B10 | | | | | | | |
| RNU11 | | | | | | | | | | |
| 372_mRnu2- | 372 | mRnu2-10 | Scn2a | hRNU12 | 2.43 | 1.77 | 2.29 | 2.16 | 0.35 | <0.001 |
| 10_Scn2aB10_ | | | B10 | | | | | | | |
| hRNU12 | | | | | | | | | | |
| 390_mRnu3b1_ | 390 | mRnu3b1 | Scn2a | hRNU1-2 | 2.39 | 1.89 | 2.24 | 2.17 | 0.25 | <0.001 |
| Scn2aB10_h | | | B10 | | | | | | | |
| RNU1-2 | | | | | | | | | | |
| 379_mRnu2- | 379 | mRnu2-10 | Scn2a | mRnu5g | 2.69 | 1.85 | 1.98 | 2.17 | 0.45 | <0.001 |
| 10_Scn2aB10_ | | | B10 | | | | | | | |
| mRnu5g | | | | | | | | | | |
| 395_mRnu3b1_ | 395 | mRnu3b1 | Scn2a | hRNU5A-1 | 1.88 | 2.25 | 2.68 | 2.27 | 0.40 | <0.001 |
| Scn2aB10_h | | | B10 | | | | | | | |
| RNU5A-1 | | | | | | | | | | |

TABLE 15
Library 5 Summary

| | | | | | | | | | | P-value |
|---|---|---|---|---|---|---|---|---|---|---|
| Name | ID | Promoter | U7 | Terminator | Rep1 | Rep2 | Rep3 | Average | SD | (ANOVA) |
| 448_mRnu6_S | 448 | mRnu6 | Scn2a | mRnu1b1 | 0.74 | 0.82 | 0.82 | 0.79 | 0.05 | 0.28 |
| cn2aB10_mRn | | | B10 | | | | | | | |
| ulb1 | | | | | | | | | | |
| 444_mRnu6_S | 444 | mRnu6 | Scn2a | hRNU11 | 0.84 | 0.74 | 0.90 | 0.83 | 0.08 | 0.40 |
| cn2aB10_hRN | | | B10 | | | | | | | |
| U11 | | | | | | | | | | |
| 446_mRnu6_S | 446 | mRnu6 | Scn2a | hRN7SK | 0.80 | 0.91 | 0.86 | 0.86 | 0.05 | 0.54 |
| cn2aB10_hRN | | | B10 | | | | | | | |
| 7SK | | | | | | | | | | |
| 454_mRnu6_S | 454 | mRnu6 | Scn2a | mRnu7 | 0.85 | 0.90 | 0.82 | 0.86 | 0.04 | 0.54 |
| cn2aB10_mRn | | | B10 | | | | | | | |
| u7 | | | | | | | | | | |
| 442_mRnu6_S | 442 | mRnu6 | Scn2a | hRNU6-1 | 0.80 | 0.88 | 0.91 | 0.86 | 0.05 | 0.58 |
| cn2aB10_hRN | | | B10 | | | | | | | |
| U6-1 | | | | | | | | | | |
| 457_mRnu6_S | 457 | mRnu6 | Scn2a | mRn7sk | 0.82 | 0.97 | 0.91 | 0.90 | 0.07 | 0.78 |
| cn2aB10_mRn | | | B10 | | | | | | | |
| 7sk | | | | | | | | | | |
| 450_mRnu6_S | 450 | mRnu6 | Scn2a | mRnu2-10 | 0.88 | 0.96 | 0.88 | 0.91 | 0.04 | 0.82 |
| cn2aB10_mRn | | | B10 | | | | | | | |
| u2-10 | | | | | | | | | | |
| 449_mRnu6_S | 449 | mRnu6 | Scn2a | mRnu1b6 | 0.95 | 0.92 | 0.89 | 0.92 | 0.03 | 0.90 |
| cn2aB10_mRn | | | B10 | | | | | | | |
| ulb6 | | | | | | | | | | |
| 436_mRnu6_S | 436 | mRnu6 | Scn2a | hRNU1-2 | 0.89 | 0.97 | 0.90 | 0.92 | 0.05 | 0.90 |
| cn2aB10_hRN | | | B10 | | | | | | | |
| U1-2 | | | | | | | | | | |
| 455_mRnu6_S | 455 | mRnu6 | Scn2a | mRnu11 | 0.89 | 0.85 | 1.02 | 0.92 | 0.09 | 0.90 |
| cn2aB10_mRn | | | B10 | | | | | | | |
| u11 | | | | | | | | | | |
| 482_mu1a1_S | 482 | mu1a1 | Scr2 | U1 | 1.02 | 0.93 | 0.86 | 0.94 | 0.08 | Control |
| cr2_U1 | | | | | | | | | | |
| 445_mRnu6_S | 445 | mRnu6 | Scn2a | hRNU12 | 0.86 | 1.01 | 0.95 | 0.94 | 0.07 | 0.98 |
| cn2aB10_hRN | | | B10 | | | | | | | |
| U12 | | | | | | | | | | |
| 451_mRnu6_S | 451 | mRnu6 | Scn2a | mRnu3b1 | 0.81 | 0.94 | 1.15 | 0.97 | 0.17 | 0.82 |
| cn2aB10_mRn | | | B10 | | | | | | | |
| u3b1 | | | | | | | | | | |
| 452_mRnu6_S | 452 | mRnu6 | Scn2a | mRnu5g | 1.07 | 0.91 | 0.93 | 0.97 | 0.09 | 0.80 |
| cn2aB10_mRn | | | B10 | | | | | | | |
| u5g | | | | | | | | | | |
| 447_mRnu6_S | 447 | mRnu6 | Scn2a | mRnu1a1 | 1.08 | 0.91 | 0.93 | 0.97 | 0.09 | 0.78 |
| cn2aB10_mRn | | | B10 | | | | | | | |
| u1a1 | | | | | | | | | | |
| 440_mRnu6_S | 440 | mRnu6 | Scn2a | hRNU4-1 | 1.05 | 1.02 | 0.94 | 1.01 | 0.06 | 0.61 |
| cn2aB10_hRN | | | B10 | | | | | | | |
| U4-1 | | | | | | | | | | |
| 456_mRnu6_S | 456 | mRnu6 | Scn2a | mRnu12 | 1.01 | 1.12 | 0.89 | 1.01 | 0.12 | 0.59 |
| cn2aB10_mRn | | | B10 | | | | | | | |
| u12 | | | | | | | | | | |
| 443_mRnu6_S | 443 | mRnu6 | Scn2a | RNU7-1 | 0.84 | 1.29 | 0.96 | 1.03 | 0.24 | 0.48 |
| cn2aB10_RN | | | B10 | | | | | | | |
| U7-1 | | | | | | | | | | |
| 435_mRnu6_S | 435 | mRnu6 | Scn2a | hRNU1-1 | 0.93 | 1.00 | 1.18 | 1.04 | 0.13 | 0.45 |
| cn2aB10_hRN | | | B10 | | | | | | | |
| U1-1 | | | | | | | | | | |
| 438_mRnu6_S | 438 | mRnu6 | Scn2a | hRNU2-1 | 0.95 | 1.30 | 0.92 | 1.06 | 0.21 | 0.36 |
| cn2aB10_hRN | | | B10 | | | | | | | |
| U2-1 | | | | | | | | | | |
| 439_mRnu6_S | 439 | mRnu6 | Scn2a | hU3 | 1.07 | 1.14 | 0.98 | 1.06 | 0.08 | 0.34 |
| cn2aB10_hU3 | | | B10 | | | | | | | |
| 481_mu1a1_S | 481 | mu1a1 | Scn2a | U1 | 0.98 | 1.07 | 1.14 | 1.06 | 0.08 | 0.34 |
| cn2aF1Scr2_U1 | | | F1Scr2 | | | | | | | |
| 437_mRnu6_S | 437 | mRnu6 | Scn2a | hRNU1-3 | 1.01 | 1.09 | 1.11 | 1.07 | 0.05 | 0.31 |
| cn2aB10_hRN | | | B10 | | | | | | | |
| U1-3 | | | | | | | | | | |
| 441_mRnu6_S | 441 | mRnu6 | Scn2a | hRNU5A-1 | 1.23 | 1.04 | 0.97 | 1.08 | 0.13 | 0.28 |
| cn2aB10_hRN | | | B10 | | | | | | | |
| U5A-1 | | | | | | | | | | |
| 419_mRnu5g_ | 419 | mRnu5g | Scn2a | hRNU6-1 | 1.10 | 1.11 | 1.21 | 1.14 | 0.06 | 0.12 |
| Scn2aB10_hR | | | B10 | | | | | | | |
| NU6-1 | | | | | | | | | | |
| 500_mRnu11_ | 500 | mRnu11 | Scn2a | mRnu2-10 | 1.26 | 1.16 | 1.08 | 1.17 | 0.09 | 0.08 |
| Scn2aB10_m | | | B10 | | | | | | | |
| Rnu2-10 | | | | | | | | | | |
| 492_mRnu11_ | 492 | mRnul | Scn2a | hRNU6-1 | 1.29 | 1.29 | 0.97 | 1.18 | 0.18 | 0.06 |
| Scn2aB10_hR | | | B10 | | | | | | | |
| NU6-1 | | | | | | | | | | |
| 420_mRnu5g_ | 420 | mRnu5g | Scn2a | RNU7-1 | 1.27 | 1.15 | 1.23 | 1.22 | 0.06 | 0.03 |
| Scn2aB10_RN | | | B10 | | | | | | | |
| U7-1 | | | | | | | | | | |
| 465_mRnu7_S | 465 | mRnu7 | Scn2a | hRNU6-1 | 1.16 | 1.43 | 1.09 | 1.23 | 0.18 | 0.03 |
| cn2aB10_hRN | | | B10 | | | | | | | |
| U6-1 | | | | | | | | | | |
| 477_mRnu7_S | 477 | mRnu7 | Scn2a | mRnu7 | 1.10 | 1.34 | 1.34 | 1.26 | 0.14 | 0.01 |
| cn2aB10_mRn | | | B10 | | | | | | | |
| u7 | | | | | | | | | | |
| 470_mRnu7_S | 470 | mRnu7 | Scn2a | mRnu1a1 | 1.24 | 1.18 | 1.36 | 1.26 | 0.09 | 0.01 |
| cn2aB10_mRn | | | B10 | | | | | | | |
| u1a1 | | | | | | | | | | |
| 428_mRnu5g_ | 428 | mRnu5g | Scn2a | mRnu3b1 | 1.33 | 1.17 | 1.29 | 1.26 | 0.08 | 0.01 |
| Scn2aB10_m | | | B10 | | | | | | | |
| Rnu3b1 | | | | | | | | | | |
| 474_mRnu7_S | 474 | mRnu7 | Scn2a | mRnu3b1 | 1.23 | 1.45 | 1.18 | 1.29 | 0.14 | 0.008 |
| cn2aB10_mRn | | | B10 | | | | | | | |
| u3b1 | | | | | | | | | | |
| 421_mRnu5g_ | 421 | mRnu5g | Scn2a | hRNU11 | 1.30 | 1.22 | 1.35 | 1.29 | 0.06 | 0.008 |
| Scn2aB10_hR | | | B10 | | | | | | | |
| NU11 | | | | | | | | | | |
| 469_mRnu7_S | 469 | mRnu7 | Scn2a | hRN7SK | 1.33 | 1.24 | 1.34 | 1.31 | 0.05 | 0.006 |
| cn2aB10_hRN | | | B10 | | | | | | | |
| 7SK | | | | | | | | | | |
| 473_mRnu7_S | 473 | mRnu7 | Scn2a | mRnu2-10 | 1.31 | 1.19 | 1.44 | 1.31 | 0.12 | 0.005 |
| cn2aB10_mRn | | | B10 | | | | | | | |
| u2-10 | | | | | | | | | | |
| 462_mRnu7_S | 462 | mRnu7 | Scn2a | hU3 | 1.33 | 1.39 | 1.23 | 1.32 | 0.08 | 0.004 |
| cn2aB10_hU3 | | | B10 | | | | | | | |
| 431_mRnu5g_ | 431 | mRnu5g | Scn2a | mRnu7 | 1.19 | 1.39 | 1.42 | 1.34 | 0.12 | 0.003 |
| Scn2aB10_m | | | B10 | | | | | | | |
| Rnu7 | | | | | | | | | | |
| 493_mRnu11_ | 493 | mRnu11 | Scn2a | RNU7-1 | 1.20 | 1.46 | 1.40 | 1.35 | 0.14 | 0.002 |
| Scn2aB10_RN | | | B10 | | | | | | | |
| U7-1 | | | | | | | | | | |
| 427_mRnu5g_ | 427 | mRnu5g | Scn2a | mRnu2-10 | 1.50 | 0.94 | 1.65 | 1.36 | 0.38 | 0.001 |
| Scn2aB10_m | | | B10 | | | | | | | |
| Rnu2-10 | | | | | | | | | | |
| 501_mRnu11_ | 501 | mRnu11 | Scn2a | mRnu3b1 | 1.37 | 1.55 | 1.19 | 1.37 | 0.18 | 0.001 |
| Scn2aB10_m | | | B10 | | | | | | | |
| Rnu3b1 | | | | | | | | | | |
| 425_mRnu5g_ | 425 | mRnu5g | Scn2a | mRnu1b1 | 1.2 | 1.45 | 1.45 | 1.37 | 0.14 | 0.001 |
| Scn2aB10_m | | | B10 | | | | | | | |
| Rnu1b1 | | | | | | | | | | |
| 461_mRnu7_S | 461 | mRnu7 | Scn2a | hRNU2-1 | 1.33 | 1.39 | 1.40 | 1.37 | 0.04 | 0.001 |
| cn2aB10_hRN | | | B10 | | | | | | | |
| U2-1 | | | | | | | | | | |
| 424_mRnu5g_ | 424 | mRnu5g | Scn2a | mRnu1a1 | 1.35 | 1.43 | 1.39 | 1.39 | 0.04 | <0.001 |
| Scn2aB10_m | | | B10 | | | | | | | |
| Rnu1a1 | | | | | | | | | | |
| 472_mRnu7_S | 472 | mRnu7 | Scn2a | mRnu1b6 | 1.30 | 1.47 | 1.42 | 1.39 | 0.09 | <0.001 |
| cn2aB10_mRn | | | B10 | | | | | | | |
| ulb6 | | | | | | | | | | |
| 499_mRnu11_ | 499 | mRnu11 | Scn2a | mRnu1b6 | 1.28 | 1.24 | 1.66 | 1.39 | 0.23 | <0.001 |
| Scn2aB10_m | | | B10 | | | | | | | |
| Rnu1b6 | | | | | | | | | | |
| 402_mRnu3b1_ | 402 | mRnu3b1 | Scn2a | mRnu1b1 | 1.30 | 1.47 | 1.46 | 1.41 | 0.09 | <0.001 |
| Scn2aB10_m | | | B10 | | | | | | | |
| Rnu1b1 | | | | | | | | | | |
| 432_mRnu5g_ | 432 | mRnu5g | Scn2a | mRnu11 | 1.23 | 1.57 | 1.44 | 1.41 | 0.17 | <0.001 |
| Scn2aB10_m | | | B10 | | | | | | | |
| Rnu11 | | | | | | | | | | |
| 414_mRnu5g_ | 414 | mRnu5g | Scn2a | hRNU1-3 | 1.26 | 1.38 | 1.61 | 1.41 | 0.18 | <0.001 |
| Scn2aB10_hR | | | B10 | | | | | | | |
| NU1-3 | | | | | | | | | | |
| 423_mRnu5g_ | 423 | mRnu5g | Scn2a | hRN7SK | 1.32 | 1.66 | 1.27 | 1.42 | 0.21 | <0.001 |
| Scn2aB10_hR | | | B10 | | | | | | | |
| N7SK | | | | | | | | | | |
| 434_mRnu5g_ | 434 | mRnu5g | Scn2a | mRn7sk | 1.49 | 1.30 | 1.51 | 1.43 | 0.12 | <0.001 |
| Scn2aB10_m | | | B10 | | | | | | | |
| Rn7sk | | | | | | | | | | |
| 466_mRnu7_S | 466 | mRnu7 | Scn2a | RNU7-1 | 1.16 | 1.85 | 1.29 | 1.44 | 0.37 | <0.001 |
| cn2aB10_RN | | | B10 | | | | | | | |
| U7-1 | | | | | | | | | | |
| 412_mRnu5g_ | 412 | mRnu5g | Scn2a | hRNU1-1 | 1.38 | 1.56 | 1.43 | 1.46 | 0.09 | <0.001 |
| Scn2aB10_hR | | | B10 | | | | | | | |
| NU1-1 | | | | | | | | | | |
| 411_mRnu3b1_ | 411 | mRnu3b1 | Scn2a | mRn7sk | 1.42 | 1.42 | 1.54 | 1.46 | 0.07 | <0.001 |
| Scn2aB10_m | | | B10 | | | | | | | |
| Rn7sk | | | | | | | | | | |
| 479_mRnu7_S | 479 | mRnu7 | Scn2a | mRnu12 | 1.45 | 1.51 | 1.45 | 1.47 | 0.03 | <0.001 |
| cn2aB10_mRn | | | B10 | | | | | | | |
| u12 | | | | | | | | | | |
| 498_mRnu11_ | 498 | mRnu11 | Scn2a | mRnu1b1 | 1.38 | 1.65 | 1.39 | 1.4 | 0.15 | <0.001 |
| Scn2aB10_m | | | B10 | | | | | | | |
| Rnu1b1 | | | | | | | | | | |
| 429_mRnu5g_ | 429 | mRnu5g | Scn2a | mRnu5g | 1.58 | 1.35 | 1.52 | 1.48 | 0.12 | <0.001 |
| Scn2aB10_m | | | B10 | | | | | | | |
| Rnu5g | | | | | | | | | | |
| 433_mRnu5g_ | 433 | mRnu5g | Scn2a | mRnu12 | 1.51 | 1.45 | 1.50 | 1.49 | 0.03 | <0.001 |
| Scn2aB10_m | | | B10 | | | | | | | |
| Rnu12 | | | | | | | | | | |
| 471_mRnu7_S | 471 | mRnu7 | Scn2a | mRnu1b1 | 1.52 | 1.33 | 1.63 | 1.49 | 0.15 | <0.001 |
| cn2aB10_mRn | | | B10 | | | | | | | |
| ulb1 | | | | | | | | | | |
| 458_mRnu7_S | 458 | mRnu7 | Scn2a | hRNU1-1 | 1.43 | 1.68 | 1.38 | 1.50 | 0.16 | <0.001 |
| cn2aB10_hRN | | | B10 | | | | | | | |
| U1-1 | | | | | | | | | | |
| 459_mRnu7_S | 459 | mRnu7 | Scn2a | hRNU1-2 | 1.36 | 1.73 | 1.40 | 1.50 | 0.20 | <0.001 |
| cn2aB10_hRN | | | B10 | | | | | | | |
| U1-2 | | | | | | | | | | |
| 478_mRnu7_S | 478 | mRnu7 | Scn2a | mRnu11 | 1.54 | 1.35 | 1.61 | 1.50 | 0.13 | <0.001 |
| cn2aB10_mRn | | | B10 | | | | | | | |
| u11 | | | | | | | | | | |
| 417_mRnu5g_ | 417 | mRnu5g | Scn2a | hRNU4-1 | 1.22 | 1.60 | 1.70 | 1.5 | 0.25 | <0.001 |
| Scn2aB10_hR | | | B10 | | | | | | | |
| NU4-1 | | | | | | | | | | |
| 422_mRnu5g_ | 422 | mRnu5g | Scn2a | hRNU12 | 1.43 | 1.57 | 1.56 | 1.52 | 0.08 | <0.001 |
| Scn2aB10_hR | | | B10 | | | | | | | |
| NU12 | | | | | | | | | | |
| 496_mRnu11_ | 496 | mRnu11 | Scn2a | hRN7SK | 1.57 | 1.39 | 1.63 | 1.53 | 0.12 | <0.001 |
| Scn2aB10_hR | | | B10 | | | | | | | |
| N7SK | | | | | | | | | | |
| 416_mRnu5g_ | 416 | mRnu5g | Scn2a | hU3 | 1.40 | 1.44 | 1.76 | 1.53 | 0.19 | <0.001 |
| Scn2aB10_hU3 | | | B10 | | | | | | | |
| 408_mRnu3b1_ | 408 | mRnu3b1 | Scn2a | mRnu7 | 1.28 | 1.65 | 1.67 | 1.54 | 0.22 | <0.001 |
| Scn2aB10_m | | | B10 | | | | | | | |
| Rnu7 | | | | | | | | | | |
| 486_mRnu11_ | 486 | mRnu11 | Scn2a | hRNU1-2 | 1.34 | 1.64 | 1.64 | 1.54 | 0.17 | <0.001 |
| Scn2aB10_hR | | | B10 | | | | | | | |
| NU1-2 | | | | | | | | | | |
| 475_mRnu7_S | 475 | mRnu7 | Scn2a | mRnu5g | 1.53 | 1.67 | 1.46 | 1.55 | 0.11 | <0.001 |
| cn2aB10_mRn | | | B10 | | | | | | | |
| u5g | | | | | | | | | | |
| 491_mRnu11_ | 491 | mRnu11 | Scn2a | hRNU5A-1 | 1.43 | 1.71 | 1.55 | 1.56 | 0.14 | <0.001 |
| Scn2aB10_hR | | | B10 | | | | | | | |
| NU5A-1 | | | | | | | | | | |
| 460_mRnu7_S | 460 | mRnu7 | Scn2a | hRNU1-3 | 1.37 | 1.73 | 1.63 | 1.58 | 0.18 | <0.001 |
| cn2aB10_hRN | | | B10 | | | | | | | |
| U1-3 | | | | | | | | | | |
| 410_mRnu3b1_ | 410 | mRnu3b1 | Scn2a | mRnu12 | 1.54 | 1.54 | 1.66 | 1.58 | 0.07 | <0.001 |
| Scn2aB10_m | | | B10 | | | | | | | |
| Rnu12 | | | | | | | | | | |
| 494_mRnu11_ | 494 | mRnu11 | Scn2a | hRNU11 | 1.60 | 1.70 | 1.60 | 1.63 | 0.06 | <0.001 |
| Scn2aB10_hR | | | B10 | | | | | | | |
| NU11 | | | | | | | | | | |
| 467_mRnu7_S | 467 | mRnu7 | Scn2a | hRNU11 | 1.66 | 1.65 | 1.68 | 1.66 | 0.02 | <0.001 |
| cn2aB10_hRN | | | B10 | | | | | | | |
| U11 | | | | | | | | | | |
| 485_mRnu11_ | 485 | mRnu11 | Scn2a | hRNU1-1 | 1.38 | 1.84 | 1.79 | 1.67 | 0.25 | <0.001 |
| Scn2aB10_hR | | | B10 | | | | | | | |
| NU1-1 | | | | | | | | | | |
| 490_mRnu11_ | 490 | mRnu11 | Scn2a | hRNU4-1 | 1.65 | 1.84 | 1.52 | 1.67 | 0.16 | <0.001 |
| Scn2aB10_hR | | | B10 | | | | | | | |
| NU4-1 | | | | | | | | | | |
| 413_mRnu5g_ | 413 | mRnu5g | Scn2a | hRNU1-2 | 1.71 | 2.00 | 1.34 | 1.68 | 0.34 | <0.001 |
| Scn2aB10_hR | | | B10 | | | | | | | |
| NU1-2 | | | | | | | | | | |
| 409_mRnu3b1_ | 409 | mRnu3b1 | Scn2a | mRnu11 | 1.50 | 1.66 | 1.89 | 1.69 | 0.20 | <0.001 |
| Scn2aB10_m | | | B10 | | | | | | | |
| Rnu11 | | | | | | | | | | |
| 488_mRnu11_ | 488 | mRnu11 | Scn2a | hRNU2-1 | 1.75 | 1.78 | 1.59 | 1.71 | 0.10 | <0.001 |
| Scn2aB10_hR | | | B10 | | | | | | | |
| NU2-1 | | | | | | | | | | |
| 495_mRnu11_ | 495 | mRnu11 | Scn2a | hRNU12 | 1.92 | 1.81 | 1.44 | 1.72 | 0.25 | <0.001 |
| Scn2aB10_hR | | | B10 | | | | | | | |
| NU12 | | | | | | | | | | |
| 415_mRnu5g_ | 415 | mRnu5g | Scn2a | hRNU2-1 | 1.80 | 1.83 | 1.58 | 1.74 | 0.14 | <0.001 |
| Scn2aB10_hR | | | B10 | | | | | | | |
| NU2-1 | | | | | | | | | | |
| 426_mRnu5g_ | 426 | mRnu5g | Scn2a | mRnu1b6 | 1.69 | 1.84 | 1.69 | 1.74 | 0.08 | <0.001 |
| Scn2aB10_m | | | B10 | | | | | | | |
| Rnu1b6 | | | | | | | | | | |
| 483_mu1a1_S | 483 | mu1a1 | Scn2a | U1 | 2.02 | 1.74 | 1.47 | 1.74 | 0.27 | <0.001 |
| cn2aD12_U1 | | | D12 | | | | | | | |
| 484_mu1a1_S | 484 | mu1a1 | Scn2a | U1 | 1.66 | 1.78 | 1.82 | 1.76 | 0.09 | <0.001 |
| cn2aB10_U1 | | | B10 | | | | | | | |
| 464_mRnu7_S | 464 | mRnu7 | Scn2a | hRNU5A-1 | 1.73 | 1.81 | 1.82 | 1.79 | 0.05 | <0.001 |
| cn2aB10_hRN | | | B10 | | | | | | | |
| U5A-1 | | | | | | | | | | |
| 463_mRnu7_S | 463 | mRnu7 | Scn2a | hRNU4-1 | 1.63 | 2.01 | 1.83 | 1.82 | 0.19 | <0.001 |
| cn2aB10_hRN | | | B10 | | | | | | | |
| U4-1 | | | | | | | | | | |
| 406_mRnu3b1_ | 406 | mRnu3b1 | Scn2a | mRnu5g | 1.75 | 2.03 | 1.72 | 1.83 | 0.17 | <0.001 |
| Scn2aB10_m | | | B10 | | | | | | | |
| Rnu5g | | | | | | | | | | |
| 468_mRnu7_S | 468 | mRnu7 | Scn2a | hRNU12 | 1.36 | 2.21 | 1.94 | 1.84 | 0.44 | <0.001 |
| cn2aB10_hRN | | | B10 | | | | | | | |
| U12 | | | | | | | | | | |
| 405_mRnu3b1_ | 405 | mRnu3b1 | Scn2a | mRnu3b1 | 1.72 | 1.75 | 2.10 | 1.86 | 0.21 | <0.001 |
| Scn2aB10_m | | | B10 | | | | | | | |
| Rnu3b1 | | | | | | | | | | |
| 404_mRnu3b1_ | 404 | mRnu3b1 | Scn2a | mRnu2-10 | 1.56 | 2.19 | 1.96 | 1.90 | 0.32 | <0.001 |
| Scn2aB10_m | | | B10 | | | | | | | |
| Rnu2-10 | | | | | | | | | | |
| 418_mRnu5g_ | 418 | mRnu5g | Scn2a | hRNU5A-1 | 1.68 | 2.71 | 1.63 | 2.01 | 0.61 | <0.001 |
| Scn2aB10_hR | | | B10 | | | | | | | |
| NU5A-1 | | | | | | | | | | |

TABLE 16
Library 6 Summary

| | | | | | | | | | | ANOVA |
|---|---|---|---|---|---|---|---|---|---|---|
| Name | ID | Promoter | U7 | Terminator | Rep1 | Rep2 | Rep3 | Average | SD | P-value |
| 2A12_194_mu | 194 | mu1a1 | Scr2 | U1 | 0.83 | 0.81 | 0.82 | 0.82 | 0.01 | 0.24 |
| 1a1_Scr2_U1 | | | | | | | | | | |
| 530_mRnu12_ | 530 | mRnu12 | Scn2a | mRn7sk | 0.96 | 0.78 | 0.94 | 0.89 | 0.10 | 0.55 |
| Scn2aB10_m | | | B10 | | | | | | | |
| Rn7sk | | | | | | | | | | |
| 515_mRnu12_ | 515 | mRnu12 | Scn2a | hRNU6-1 | 0.92 | 0.88 | 0.95 | 0.92 | 0.03 | 0.68 |
| Scn2aB10_hR | | | B10 | | | | | | | |
| NU6-1 | | | | | | | | | | |
| 546_mRn7sk_ | 546 | mRn7sk | Scn2a | mRnu2-10 | 0.73 | 1.05 | 1.10 | 0.96 | 0.20 | 0.94 |
| Scn2aB10_m | | | B10 | | | | | | | |
| Rnu2-10 | | | | | | | | | | |
| 2H11_193_mu | 193 | mu1a1 | Scn2a | U1 | 1.03 | 0.86 | 1.02 | 0.97 | 0.10 | Control |
| 1a1_Scn2aF1S | | | F1Scr | | | | | | | |
| cr2_U1 | | | 2 | | | | | | | |
| 535_mRn7sk_ | 535 | mRn7sk | Scn2a | hU3 | 1.08 | 1.06 | 0.99 | 1.04 | 0.04 | 0.57 |
| Scn2aB10_hU3 | | | B10 | | | | | | | |
| 542_mRn7sk_ | 542 | mRn7sk | Scn2a | hRN7SK | 1.05 | 1.03 | 1.11 | 1.06 | 0.05 | 0.47 |
| Scn2aB10_hR | | | B10 | | | | | | | |
| N7SK | | | | | | | | | | |
| 548_mRn7sk_ | 548 | mRn7sk | Scn2a | mRnu5g | 1.08 | 0.95 | 1.20 | 1.07 | 0.12 | 0.4 |
| Scn2aB10_m | | | B10 | | | | | | | |
| Rnu5g | | | | | | | | | | |
| 524_mRnu12_ | 524 | mRnu12 | Scn2a | mRnu3b1 | 1.21 | 0.9 | 1.09 | 1.09 | 0.12 | 0.35 |
| Scn2aB10_m | | | B10 | | | | | | | |
| Rnu3b1 | | | | | | | | | | |
| 539_mRn7sk_ | 539 | mRn7sk | Scn2a | RNU7-1 | 1.16 | 0.83 | 1.27 | 1.09 | 0.23 | 0.36 |
| Scn2aB10_RN | | | B10 | | | | | | | |
| U7-1 | | | | | | | | | | |
| 534_mRn7sk_ | 534 | mRn7sk | Scn2a | hRNU2-1 | 1.27 | 0.90 | 1.12 | 1.09 | 0.19 | 0.32 |
| Scn2aB10_hR | | | B10 | | | | | | | |
| NU2-1 | | | | | | | | | | |
| 545_mRn7sk_ | 545 | mRn7sk | Scn2a | mRnu1b6 | 1.39 | 1.14 | 0.80 | 1.11 | 0.29 | 0.27 |
| Scn2aB10_m | | | B10 | | | | | | | |
| Rnu1b6 | | | | | | | | | | |
| 538_mRn7sk_ | 538 | mRn7sk | Scn2a | hRNU6-1 | 1.18 | 0.94 | 1.24 | 1.12 | 0.16 | 0.24 |
| Scn2aB10_hR | | | B10 | | | | | | | |
| NU6-1 | | | | | | | | | | |
| 541_mRn7sk_ | 541 | mRn7sk | Scn2a | hRNU12 | 1.17 | 0.94 | 1.25 | 1.12 | 0.16 | 0.24 |
| Scn2aB10_hR | | | B10 | | | | | | | |
| NU12 | | | | | | | | | | |
| 532_mRn7sk_ | 532 | mRn7sk | Scn2a | hRNU1-2 | 1.24 | 0.98 | 1.18 | 1.13 | 0.14 | 0.2 |
| Scn2aB10_hR | | | B10 | | | | | | | |
| NU1-2 | | | | | | | | | | |
| 531_mRn7sk_ | 531 | mRn7sk | Scn2a | hRNU1-1 | 1.19 | 1.13 | 1.13 | 1.15 | 0.03 | 0.16 |
| Scn2aB10_hR | | | B10 | | | | | | | |
| NU1-1 | | | | | | | | | | |
| 553_mRn7sk_ | 553 | mRn7sk | Scn2a | mRn7sk | 0.97 | 1.26 | 1.33 | 1.18 | 0.19 | 0.09 |
| Scn2aB10_m | | | B10 | | | | | | | |
| Rn7sk | | | | | | | | | | |
| 537_mRn7sk_ | 537 | mRn7sk | Scn2a | hRNU5A-1 | 1.15 | 1.09 | 1.38 | 1.2 | 0.15 | 0.07 |
| Scn2aB10_hR | | | B10 | | | | | | | |
| NU5A-1 | | | | | | | | | | |
| 1A1_001_mul | 001 | mu1a1 | Scn2a | U1 | 1.14 | 1.33 | 1.15 | 1.21 | 0.10 | 0.07 |
| al_Scn2aF1Sc | | | F1Scr | | | | | | | |
| r2_U1 | | | 2 | | | | | | | |
| 544_mRn7sk_ | 544 | mRn7sk | Scn2a | mRnu1b1 | 1.18 | 1.09 | 1.36 | 1.21 | 0.14 | 0.06 |
| Scn2aB10_m | | | B10 | | | | | | | |
| Rnu1b1 | | | | | | | | | | |
| 523_mRnu12_ | 523 | mRnu12 | Scn2a | mRnu2-10 | 1.35 | 1.04 | 1.24 | 1.21 | 0.16 | 0.06 |
| Scn2aB10_m | | | B10 | | | | | | | |
| Rnu2-10 | | | | | | | | | | |
| 552_mRn7sk_ | 552 | mRn7sk | Scn2a | mRnu12 | 1.22 | 1.03 | 1.42 | 1.22 | 0.20 | 0.05 |
| Scn2aB10_m | | | B10 | | | | | | | |
| Rnu12 | | | | | | | | | | |
| 543_mRn7sk_ | 543 | mRn7sk | Scn2a | mRnu1a1 | 1.22 | 1.17 | 1.28 | 1.22 | 0.05 | 0.05 |
| Scn2aB10_m | | | B10 | | | | | | | |
| Rnu1a1 | | | | | | | | | | |
| 516_mRnu12_ | 516 | mRnu12 | Scn2a | RNU7-1 | 1.17 | 1.15 | 1.38 | 1.23 | 0.13 | 0.04 |
| Scn2aB10_RN | | | B10 | | | | | | | |
| U7-1 | | | | | | | | | | |
| 529_mRnu12_ | 529 | mRnu12 | Scn2a | mRnu12 | 1.36 | 1.03 | 1.30 | 1.23 | 0.18 | 0.04 |
| Scn2aB10_m | | | B10 | | | | | | | |
| Rnu12 | | | | | | | | | | |
| 525_mRnu12_ | 525 | mRnu12 | Scn2a | mRnu5g | 1.36 | 1.29 | 1.12 | 1.26 | 0.12 | 0.03 |
| Scn2aB10_m | | | B10 | | | | | | | |
| Rnu5g | | | | | | | | | | |
| 533_mRn7sk_ | 533 | mRn7sk | Scn2a | hRNU1-3 | 1.19 | 1.27 | 1.33 | 1.26 | 0.07 | 0.02 |
| Scn2aB10_hR | | | B10 | | | | | | | |
| NU1-3 | | | | | | | | | | |
| 540_mRn7sk_ | 540 | mRn7sk | Scn2a | hRNU11 | 1.20 | 1.01 | 1.63 | 1.28 | 0.32 | 0.02 |
| Scn2aB10_hR | | | B10 | | | | | | | |
| NU11 | | | | | | | | | | |
| 512_mRnu12_ | 512 | mRnu12 | Scn2a | hU3 | 1.31 | 1.16 | 1.47 | 1.32 | 0.15 | 0.008 |
| Scn2aB10_hU3 | | | B10 | | | | | | | |
| 519_mRnu12_ | 519 | mRnu12 | Scn2a | hRN7SK | 1.47 | 1.35 | 1.16 | 1.33 | 0.16 | 0.006 |
| Scn2aB10_hR | | | B10 | | | | | | | |
| N7SK | | | | | | | | | | |
| 508_mRnu12_ | 508 | mRnu12 | Scn2a | hRNU1-1 | 1.46 | 1.22 | 1.33 | 1.34 | 0.12 | 0.005 |
| Scn2aB10_hR | | | B10 | | | | | | | |
| NU1-1 | | | | | | | | | | |
| 2C7 154_hR | 154 | hRNU5A-1 | Scn2a | hRNU6-1 | 1.45 | 1.30 | 1.26 | 1.34 | 0.10 | 0.005 |
| NU5A- | | | B10 | | | | | | | |
| 1_Scn2aB10_ | | | | | | | | | | |
| hRNU6-1 | | | | | | | | | | |
| 1C5 036_hR | 036 | hRNU1-2 | Scn2a | RNU7-1 | 1.36 | 1.30 | 1.40 | 1.35 | 0.05 | 0.003 |
| NU1- | | | B10 | | | | | | | |
| 2_Scn2aB10_ | | | | | | | | | | |
| RNU7-1 | | | | | | | | | | |
| 517_mRnu12_ | 517 | mRnu12 | Scn2a | hRNU11 | 1.62 | 1.13 | 1.32 | 1.36 | 0.25 | 0.003 |
| Scn2aB10_hR | | | B10 | | | | | | | |
| NU11 | | | | | | | | | | |
| 1D7 054_hR | 054 | hRNU1-3 | Scn2a | hRNU2-1 | 1.49 | 1.22 | 1.44 | 1.38 | 0.14 | 0.001 |
| NU1- | | | B10 | | | | | | | |
| 3_Scn2aB10_ | | | | | | | | | | |
| hRNU2-1 | | | | | | | | | | |
| 513_mRnu12_ | 513 | mRnu12 | Scn2a | hRNU4-1 | 1.34 | 1.26 | 1.56 | 1.39 | 0.16 | 0.001 |
| Scn2aB10_hR | | | B10 | | | | | | | |
| NU4-1 | | | | | | | | | | |
| 528_mRnu12_ | 528 | mRnu12 | Scn2a | mRnu11 | 1.36 | 1.35 | 1.46 | 1.39 | 0.06 | 0.001 |
| Scn2aB10_m | | | B10 | | | | | | | |
| Rnu11 | | | | | | | | | | |
| 511_mRnu12_ | 511 | mRnu12 | Scn2a | hRNU2-1 | 1.57 | 1.36 | 1.28 | 1.40 | 0.15 | <0.001 |
| Scn2aB10_hR | | | B10 | | | | | | | |
| NU2-1 | | | | | | | | | | |
| 509_mRnu12_ | 509 | mRnu12 | Scn2a | hRNU1-2 | 1.27 | 1.45 | 1.48 | 1.40 | 0.12 | <0.001 |
| Scn2aB10_hR | | | B10 | | | | | | | |
| NU1-2 | | | | | | | | | | |
| 510_mRnu12_ | 510 | mRnu12 | Scn2a | hRNU1-3 | 1.47 | 1.4 | 1.41 | 1.43 | 0.04 | <0.001 |
| Scn2aB10_hR | | | B10 | | | | | | | |
| NU1-3 | | | | | | | | | | |
| 521_mRnu12_ | 521 | mRnu12 | Scn2a | mRnu1b1 | 1.48 | 1.3' | 1.45 | 1.43 | 0.06 | <0.001 |
| Scn2aB10_m | | | B10 | | | | | | | |
| Rnu1b1 | | | | | | | | | | |
| 2B12 195 mu | 195 | mu1a1 | Scn2a | U1 | 1.52 | 1.35 | 1.44 | 1.44 | 0.08 | <0.001 |
| 1a1_Scn2aD1 | | | D12 | | | | | | | |
| 2_U1 | | | | | | | | | | |
| 518_mRnu12_ | 518 | mRnu12 | Scn2a | hRNU12 | 1.41 | 1.2 | 1.69 | 1.44 | 0.24 | <0.001 |
| Scn2aB10_hR | | | B10 | | | | | | | |
| NU12 | | | | | | | | | | |
| 506_mRnu11_ | 506 | mRnu11 | Scn2a | mRnu12 | 1.31 | 1.59 | 1.68 | 1.53 | 0.20 | <0.001 |
| Scn2aB10_m | | | B10 | | | | | | | |
| Rnu12 | | | | | | | | | | |
| 514_mRnu12_ | 514 | mRnu12 | Scn2a | hRNU5A-1 | 2.02 | 1.12 | 1.45 | 1.53 | 0.46 | <0.001 |
| Scn2aB10_hR | | | B10 | | | | | | | |
| NU5A-1 | | | | | | | | | | |
| 527_mRnu12_ | 527 | mRnu12 | Scn2a | mRnu7 | 1.17 | 1.80 | 1.65 | 1.54 | 0.33 | <0.001 |
| Scn2aB10_m | | | B10 | | | | | | | |
| Rnu7 | | | | | | | | | | |
| 2C12_196_mu | 196 | mu1a1 | Scn2a | U1 | 1.54 | 1.41 | 1.68 | 1.54 | 0.13 | <0.001 |
| 1a1_Scn2aB10_ | | | B10 | | | | | | | |
| U1 | | | | | | | | | | |
| 507_mRnu11_ | 507 | mRnu11 | Scn2a | mRn7sk | 1.38 | 1.57 | 1.74 | 1.57 | 0.18 | <0.001 |
| Scn2aB10_m | | | B10 | | | | | | | |
| Rn7sk | | | | | | | | | | |
| 522_mRnu12_ | 522 | mRnu12 | Scn2a | mRnu1b6 | 1.51 | 1.50 | 1.75 | 1.59 | 0.14 | <0.001 |
| Scn2aB10_m | | | B10 | | | | | | | |
| Rnu1b6 | | | | | | | | | | |
| 1B7 052_hR | 052 | hRNU1-3 | Scn2a | hRNU1-2 | 1.77 | 1.45 | 1.66 | 1.62 | 0.17 | <0.001 |
| NU1- | | | B10 | | | | | | | |
| 3_Scn2aB10_ | | | | | | | | | | |
| hRNU1-2 | | | | | | | | | | |
| 520_mRnu12_ | 520 | mRnu12 | Scn2a | mRnu1a1 | 1.64 | 1.63 | 1.62 | 1.63 | 0.01 | <0.001 |
| Scn2aB10_m | | | B10 | | | | | | | |
| Rnu1a1 | | | | | | | | | | |
| 1B11_084_hR | 084 | hRNU2-1 | Scn2a | hRNU12 | 1.89 | 1.42 | 1.75 | 1.69 | 0.24 | <0.001 |
| NU2- | | | B10 | | | | | | | |
| 1_Scn2aB10_ | | | | | | | | | | |
| hRNU12 | | | | | | | | | | |
| 2C4_128_hR | 128 | hRNU4-1 | Scn2a | hU3 | 1.69 | 1.45 | 2.08 | 1.74 | 0.31 | <0.001 |
| NU4- | | | B10 | | | | | | | |
| 1_Scn2aB10_ | | | | | | | | | | |
| hU3 | | | | | | | | | | |
| 505_mRnu11_ | 505 | mRnu11 | Scn2a | mRnu11 | 1.75 | 1.63 | 1.93 | 1.77 | 0.15 | <0.001 |
| Scn2aB10_m | | | B10 | | | | | | | |
| Rnu11 | | | | | | | | | | |
| 2E7_156_hRN | 156 | hRNU5A-1 | Scn2a | hRNU11 | 1.97 | 1.60 | 2.00 | 1.86 | 0.22 | <0.001 |
| U5A- | | | B10 | | | | | | | |
| 1_Scn2aB10_ | | | | | | | | | | |
| hRNU11 | | | | | | | | | | |
| 1D1_004_mul | 004 | mu1a1 | Scn2a | U1 | 1.99 | 1.73 | 1.86 | 1.86 | 0.13 | <0.001 |
| al_Scn2aB10_ | | | B10 | | | | | | | |
| U1 | | | | | | | | | | |
| 3B7_253_hR | 253 | hRNU12 | Scn2a | hRNU12 | 1.92 | 1.64 | 2.06 | 1.87 | 0.22 | <0.001 |
| NU12_Scn2a | | | B10 | | | | | | | |
| B10_hRNU12 | | | | | | | | | | |
| 2A1_100_mul | 100 | mu1a1 | Scn2a | U1 | 1.86 | 1.80 | 2.05 | 1.90 | 0.13 | <0.001 |
| al_Scn2aB10_ | | | B10 | | | | | | | |
| U1 | | | | | | | | | | |
| 504_mRnu11_ | 504 | mRnu11 | Scn2a | mRnu7 | 1.82 | 2.03 | 1.94 | 1.93 | 0.10 | <0.001 |
| Scn2aB10_m | | | B10 | | | | | | | |
| Rnu7 | | | | | | | | | | |
| 2A7_152_hR | 152 | hRNU5A-1 | Scn2a | hRNU4-1 | 2.03 | 1.64 | 2.15 | 1.94 | 0.27 | <0.001 |
| NU5A- | | | B10 | | | | | | | |
| 1_Scn2aB10_ | | | | | | | | | | |
| hRNU4-1 | | | | | | | | | | |
| 2B6_144_hR | 144 | hRNU4-1 | Scn2a | mRnu11 | 2.18 | 1.79 | 1.90 | 1.96 | 0.20 | <0.001 |
| NU4- | | | B10 | | | | | | | |
| 1_Scn2aB10_ | | | | | | | | | | |
| mRnu11 | | | | | | | | | | |
| 2F8_166_hRN | 166 | hRNU5A-1 | Scn2a | mRnu7 | 1.79 | 1.90 | 2.24 | 1.98 | 0.23 | <0.001 |
| U5A- | | | B10 | | | | | | | |
| 1_Scn2aB10_ | | | | | | | | | | |
| mRnu7 | | | | | | | | | | |
| 1E7_055_hRN | 055 | hRNU1-3 | Scn2a | hU3 | 2.01 | 2.10 | 2.05 | 2.06 | 0.04 | <0.001 |
| U1- | | | B10 | | | | | | | |
| 3_Scn2aB10_ | | | | | | | | | | |
| hU3 | | | | | | | | | | |
| 1A12_091_hR | 091 | hRNU2-1 | Scn2a | mRnu5g | 2.18 | 1.89 | 2.11 | 2.06 | 0.15 | <0.001 |
| NU2- | | | B10 | | | | | | | |
| 1_Scn2aB10_ | | | | | | | | | | |
| mRnu5g | | | | | | | | | | |
| 3B8_262_hR | 262 | hRNU12 | Scn2a | mRnu7 | 2.02 | 1.90 | 2.30 | 2.07 | 0.21 | <0.001 |
| NU12_Scn2a | | | B10 | | | | | | | |
| B10_mRnu7 | | | | | | | | | | |
| 502_mRnu11_ | 502 | mRnu11 | Scn2a | mRnu5g | 1.86 | 1.92 | 2.50 | 2.09 | 0.36 | <0.001 |
| Scn2aB10_m | | | B10 | | | | | | | |
| Rnu5g | | | | | | | | | | |
| 1E6_047_hRN | 047 | hRNU1-2 | Scn2a | mRnu7 | 2.06 | 1.98 | 2.42 | 2.16 | 0.24 | <0.001 |
| U1- | | | B10 | | | | | | | |
| 2_Scn2aB10_ | | | | | | | | | | |
| mRnu7 | | | | | | | | | | |
| 3A6_244_hR | 244 | hRNU12 | Scn2a | hRNU1-2 | 2.69 | 2.47 | 2.35 | 2.50 | 0.17 | <0.001 |
| NU12_Scn2a | | | B10 | | | | | | | |
| B10_hRNU1- | | | | | | | | | | |
| 2 | | | | | | | | | | |

### EXAMPLES

### Example 1: Exemplary Vectors for Modulating MECP2 Expression

[0363] An AAV-based gene therapy approach was designed for treating Rett Syndrome without toxic transgene overexpression including multiple functional units (FIG. 1B; Table 1):
[0364] 1. A weak, ubiquitous promoter (e.g.-Ubc, PGK, EF1a-core). In instances, the promoter can be strengthened via the SV40 intron.
[0365] 2. The endogenous MECP2 5′ UTR and Kozak sequence. In instances, the vector does not include the MECP2 5′ UTR and/or uses a standard Kozak sequence (GCC (RCC) ATG, where R is any nucleotide and ATG is the start codon).
[0366] 3. The full-length MECP2 coding sequence including exons 1, 3, and 4. In instances, endogenous intron fragments are included between exons 1 and 3 or 3 and 4.
[0367] 4. An engineered 3′ UTR including multiple fragments from the endogenous MECP2 3′ UTR and the distal MECP2 polyA signal. In instances, the vector does not include this element, and only includes a standard polyA signal (e.g.-bGH, SV40, hGH).
[0368] 5. A U7 module to suppress splicing of endogenous MECP2 transcripts. The U7 module can include a single U7 expression cassette or an array. The U7 module can include standard U7 regulatory sequences (promoter, 3′ element) or altered sequences from other small RNAs or engineered sequences.

[0369] With this approach, we aim to avoid toxic overexpression of MECP2 by depleting endogenous MECP2 in cells expressing from the wildtype X chromosome, while simultaneously expressing wildtype MECP 2 under the control of a constitutively expressed promoter and endogenous regulatory elements.

### Example 2: Identification and Validation of U7 Cassettes for Depletion of Endogenous MECP2

[0370] We began by performing a screen in mouse Neuro-2a cells (ATCC CCL-131) for U7 targeting sequences that can efficiently reduce total Mecp2 transcript levels. We screened 92 different U7 antisense sequences targeted to regions surrounding the intron/exon junctions of Mecp2 and paired them with a canonical exonic splicing silencer sequence (Tables 2 and 3) and ranked them via qRT-PCR based on their ability to suppress Mecp2 expression (FIG. 3). Based on our screening we identified several high-confidence hits, including two top candidates targeting the 5′ end of intron 1 and then 3′ end of exon 3, and further validated their activity in N2a cells (FIG. 4). Next, we generated expression constructs carrying a Ubc-Mecp2-2A-EGFP cassette with and without fragments of introns 1 and 3. These transcripts are efficiently spliced and allowed us to test whether the identified U7 targeting sequences could auto-regulate transgene splicing and overall transgene-derived Mecp2 levels. We transfected these constructs into Neuro-2a cells with plasmids expressing U7 candidates and observed significant reduction of Mecp2 levels in constructs containing introns compared to those lacking introns (FIG. 5).

[0371] Although we observed significant reduction of Mecp2 levels in Neuro-2a cells, we sought to improve the strength of our U7 cassettes to block Mecp2 splicing more efficiently by generating a second generation of U7 cassettes expressing an array of 4 identical U7 modules. We packaged the top candidate construct, e1-3, in AAV and then performed a dose-response assay in cultured primary mouse hippocampal neurons to assess U7-dependent reduction of Mecp2. FIG. 6 shows that increasing the dose of U7 AAV progressively decreases Mecp2 down to ~50% compared to wildtype. Of note, AAV9 is not capable of transducing many glial cell types found in these mixed cultures (~50% neurons), suggesting that our constructs can achieve near-complete silencing of Mecp2 expression at high doses. To validate our U7 targeting sequences in a more therapeutically relevant tissue, we injected wildtype C57Bl/6J mice with these 4X constructs expressing either a scramble U7 targeting sequence or the top candidates (e1-3 or e3-3), waited 3 weeks, and then collected tissue samples and performed immunohistochemistry for MECP2 protein. Because these AAVs co-expressed GFP, we binned GFP+ cells and analyzed their distribution of MECP2 protein levels. As seen in FIG. 7, cells from animals injected with e1-3 or e3-3 constructs show significantly reduced levels of MECP2 protein across analyzed cells compared to those from animals injected with a Scramble construct. Together, these data show that our U7 constructs reduce MECP2 protein levels in vivo.

### Example 3: Therapeutic Vectors Combining MECP2 Gene Replacement and U7-Based Depletion of Endogenous MECP2

[0372] We next sought to combine our U7-based approach for depletion of endogenous Mecp2 with replacement of Mecp2 under the control of a weak, ubiquitous promoter. In our first embodiment, we chose the UbC promoter, which drives expression across all cell types at a low level. We systemically injected wild-type C57B16/J mice with AAVs expressing 1) a scrambled U7 cassette, 2) Ubc-Mecp2, 3), Ubc-Mecp2-U7-e1-3, or 4) Ubc-Mecp2-U7-e3-3 and then performed immunohistochemistry for MECP2 (FIG. 8). Analysis of MECP2 expression levels across cells showed that expression of Ubc-Mecp2 without a U7 cassette targeting endogenous Mecp2 resulted in a significant number of cells overexpressing MECP2, but that this was either reduced or ablated in animals injected with AAVs co-expressing such U7 cassettes (FIG. 9-10).

[0373] As a proof-of-concept that these gene therapy vectors can successfully rescue MECP2 to wild-type levels without widespread overexpression in a therapeutically relevant animal, we injected heterozygous Mecp2 mutant female mice with control or therapeutic AAVs and performed the same immunohistochemistry-based analyses described in FIG. 8-10. Once again, we found that co-expression of Mecp2 from the Ubc promoter alongside a 4X U7 cassette was capable of restoring MECP2 levels to those similar to control animals and eliminated the presence of cells expressing higher-than-wildtype levels of MECP2 that are seen in mice injected with Ubc-Mecp2 alone (FIG. 11). Together, these data demonstrate the ability of our vectors to reduce endogenous Mecp2 expression and restore normal MECP2 levels without overexpression.

### Example 4: Vector Modifications

[0374] We have also developed additional versions of this gene therapy vector to improve different aspects. In the data shown in FIG. 11, we noticed that the distribution of MECP2 levels in Ubc-Mecp2-U7-injected animals was shifted to a lower level compared to wild-type animals, suggesting that most transduced cells did not have their MECP2 levels fully rescued. Thus, we developed several vectors with different modifications to strengthen expression:
[0375] Ubc promoter replaced with PGK promoter
[0376] Ubc promoter replaced with EF1a core promoter
[0377] SV40 intron inserted immediately downstream of Ubc promoter
[0378] All promoter backbones+a shortened version of intron 1 inserted in the Mecp2 CDS
[0379] All promoter backbones+a shortened version of intron 3 inserted in the Mecp2 CDS
[0380] All promoter backbones+shortened versions of introns 1 and 3 inserted in the Mecp2 CDS

[0381] Second, in an effort to further strengthen the expression and function of the U7 cassettes included in these gene therapy vectors, we modified the U7 promoter and 3′ terminator elements in several ways:
[0382] Replaced mouse U7 promoter with mouse U1a1 promoter
[0383] Replaced mouse U7 promoter with mouse U1a1 promoter and replaced mouse U7 3′ element with human U1-1 3′ element
[0384] Replaced mouse U7 promoter with human U1-1 promoter
[0385] Replaced mouse U7 promoter and 3′ element with human U1-1 promoter and 3′ element
[0386] Replaced DSE of mouse U7 promoter with DSE of human U1-1 and PSE of mouse U1a1

### Example 5: Validation of Therapeutic Approach in Mouse

[0387] Based on the data and modifications in examples 4 and 5, U7 candidate 1 was selected for further validation of the therapeutic approach. First, the ability of this vector to control MECP2 protein levels across a 50X dose range was tested in wild-type mice injected systemically with AAV encoding either the therapeutic candidate or a control unregulated vector consisting of the Ubc-SV40int promoter driving MECP2 with an SV40 polyA terminator and no additional regulatory elements. Per cell MECP2 levels were measured via immunohistochemistry in the cortex and thalamus using an in-house machine learning pipeline. Animals injected with the control unregulated vector showed significant dose-mediated overexpression of MECP2 in both brain regions (FIGS. 12-13), but animals injected with the erase-and-replace vector, which we will refer to as Candidate-02 from hereon, were resistant to widespread overexpression even at the 50X dose and even in the thalamus, which is transduced especially well by PHP.eB (FIG. 13). We further confirmed the molecular therapeutic potential of Candidate-02 in heterozygous Mecp2^{+/-} female mice, where treatment with Candidate-02 resulted in 86% of thalamic cells expressing normal levels of MECP2 at a clinically-relevant dose, as compared to only 37% of cells in animals treated with the unregulated vector (FIG. 14).

[0388] To assess the phenotypic therapeutic potential of Candidate-02, hemizygous Mecp2 male mice and wild-type control animals were injected with either saline or Candidate-02 via IV injection at P28 at 2 doses: 4e12vg/kg (1X) and 2e13vg/kg (5X). While hemizygous males are not a genetically accurate model of Rett Syndrome, which is observed almost exclusively in females, they serve as an important preclinical tool for evaluating therapeutic potential due to their severe phenotypic manifestations (in contrast to heterozygous female mice that exhibit extremely mild phenotypes). Hemizygous males injected with saline survived an average of 9 weeks, while those injected with either 1X or 5X doses of Candidate-02 survived for an average of 24 weeks (FIG. 15). Furthermore, animals injected with Candidate-02 showed a significantly reduced progression of phenotypic severity (FIG. 16), as measured using the “Bird Score,” which assays gait, mobility, hindlimb clasping, breathing abnormalities, tremor, and general body condition across a 12-point scale (each domain scored 0-2).

[0389] Efficacy was also assessed in two additional settings. First, hemizygous males were injected systemically with saline, 2e13vg/kg AAV, or 1e14vg/kg AAV at P14. This models a more clinically-relevant delivery time and allows delivery of therapeutic vector at a time when phenotypic progression is less severe. In this cohort a dose-dependent rescue of lethality was observed when administering Candidate-02 as compared to saline, which showed a median survival of 9 weeks. Mice injected with 2e13vg/kg AAV showed a median survival of 27 weeks and as of 39 weeks-of-age no death was observed in the 1e14vg/kg group (FIG. 17). Once again, suppression of severe phenotypic progression was also observed in AAV-treated animals (FIG. 18). Heterozygous female Mecp2 mutants were also injected with saline or AAV at P28, though females exhibit an extremely mild phenotype with the most overt abnormality being obesity. Female mutants injected with 2e13vg/kg AAV showed a clear suppression of obesity at 34 weeks-of-age (FIG. 19), further supporting the therapeutic efficacy of the presented gene therapy approach across Mecp2 phenotypes and ages.

### Example 6: Screening for Human-Optimized U7 Candidates

[0390] Proof-of-concept studies demonstrated effective control of MECP2 protein levels across cells and AAV doses using a mouse-optimized vector. For enhanced therapeutic efficacy in humans, human-specific U7 constructs were designed and tested to identify cassettes capable of efficient suppression of endogenous MECP2. Previous work found that qPCR-based screening of MECP 2 expression levels is difficult due to MECP2-dependent changes across the transcriptome, which hinder normalization required for accurate quantification. Therefore, luciferase-based reporters were designed to enable quantitative assessment of MECP2 splicing from either exon 1-3 or exon 3-4. Briefly, each reporter was driven by a Ubc promoter placed upstream of a Kozak sequence, exon ⅓, a 5′ fragment of intron ⅓, a 3′ fragment of intron ⅓, and a fragment of exon ¾ in-frame with GSG-T2A-fLuc. Proper splicing of each reporter leads to expression of function firefly luciferase, while splicing suppression decreases luciferase levels and subsequent luciferase activity, which can be assayed via dual-luciferase assay. Multiple U7 libraries were designed targeting the intron/exon junctions of exons 1, 3, and 4 and libraries were co-transfected into HEK293T cells along with either the exon 1-3 splice reporter or the exon 3-4 splice reporter along with a control renilla plasmid (Tables 6 and 7). Firefly luciferase was normalized to renilla and relative luciferase levels were calculated compared to control U7 vectors to identify candidates that could significantly suppress reporter activity (Tables 6 and 7).

[0391] To assess the validity of the screening platform, two candidates from the screen that showed high levels of MECP2 suppression (via luciferase reporter) were cloned into 3X U7 AAV vectors and differentiated ReNcell CX cultures (human cortical neurons) were treated with 1e10vg AAV or formulation buffer. 1e10vg transduces ~70% of neurons in culture, so a reduction of MECP2 of ~70% would represent near-complete suppression of MECP2 by a tested U7 candidate. Compared to cells treated with formulation buffer, candidates 1 and 2 were both capable of significant reduction of MECP2 protein levels, with candidate 1 showing near-complete suppression (FIG. 20)

### Example 7: Design and Molecular Validation of Humanized Vector

[0392] Previous studies of molecular efficacy of the therapeutic construct were performed using a vector encoding an HA-tagged version of the mouse Mecp2 CDS and mouse U7 cassettes. To test the ability of a fully humanized vector to control MECP2 protein levels across a range of AAV doses in a therapeutically relevant setting, we designed new vectors lacking the HA tag, replaced the mouse CDS with the human CDS, and replaced the 3X mouse U7 array with a human 3X U7 array encoding one of two candidate human U7 sequences identified in the human U7 screen (FIG. 21). The U7 terminator sequence was also replaced with the human U1-1 terminator (HU1-1). AAV was produced and differentiated ReNcell CX cultures (human cortical neurons) were transduced with 3 escalating doses of AAV or AAV formulation buffer before assaying MECP2 protein levels. For comparison, the validated mouse vector used in in vivo validation studies was also transduced. All three vectors showed strong homeostatic regulation of MECP2 protein levels at clinically-relevant doses (2e9vg & 2e 10vg) and the human vector encoding U7 Candidate #1 showed significant homeostatic control even at the very high dose of 2e11vg, indicating that the erase-and-replace approach has strong therapeutic potential in human neurons (FIG. 22).

### Example 8: Platform Expansion and Validation of Promoter/Terminator Combinations Driving U7 Expression

[0393] Given the success in improving programmed U7-mediated splice modulation with promoters and terminators from the U1 family of snRNAs, the platform was extended by testing additional combinations of promoter and terminator regions from mouse and human snRNAs. Because some core promoter and terminator elements are not well-defined for all small RNAs across species, regions of ~500 bp upstream and downstream of the coding regions of human and mouse small RNAs were selected for testing. In this case a target was SCN2A, and a U7 system targeted SCN2A mRNA as a target mRNA. A library of constructs, each encoding an engineered U7 snRNA targeting exon 13N of mouse Scn2a driven by one of 529 combinations of the chosen promoters and terminators was generated (Table 10A). Construct fragments in Table 10A were named sequentially in the order of a three-digit fragment ID number, a recombinant promoter sequence (SEQ ID NOs: 20 and 318-340 from Table 8), a U7 core sequence (Table 10B), and finally a recombinant 3′ signal/terminator sequence (SEQ ID NOs: 24 and 341-363 from Table 8), and were constructed 5′ to 3′ in the same order.

[0394] To screen for the ability of these promoters and terminators to drive high levels of functional U7 expression, a luciferase reporter with the following features was generated: a relatively weak ubiquitous promoter (Ubc-SV40 pA), a canonical Kozak sequence, a fragment of mouse Scn2a exon 13, a fragment of mouse Scn2a intron 13, mouse Scn2a exon 13N, another fragment of mouse Scn2a intron 13, and a fragment of mouse Scn2a exon 14 fused in-frame to firefly luciferase (Table 9, FIG. 23). Under normal conditions a significant fraction of transcripts include exon 13N, which is out-of-frame and leads to nonsense-mediated decay, thus reducing luciferase levels. Successful suppression of exon 13N inclusion by U7 results in proper in-frame expression of luciferase, which can be read out via luciferase enzymatic activity.

[0395] Using this system a candidate ESS and U7 antisense sequence were identified that can efficiently suppress exon 13N inclusion and increase luciferase activity when driven by the combination of the mulal promoter and HUI terminator. The screen was then validated in mouse Neuro-2a cells, where it was demonstrated that treatment with multiple candidate mulal-ESS-Scn2a -U7-HU1 plasmids identified in the screen could efficiently suppress Scn2a exon 13N splicing and increase productive Scn2a transcript levels (FIG. 24). Virus was also produced using three different U7 targeting sequences identified with this system and transduction of differentiated ReNcell CX cultures revealed significant up-regulation of Nav1.2 levels (FIG. 25), verifying that the luciferase reporter activity faithfully predicts modulation of splicing of endogenous transcripts.

[0396] Using this validated system, Neuro-2a cells were co-transfected with the luciferase reporter, a control plasmid expressing Renilla luciferase, and individual plasmids from the 529 candidates in this example. The library was split into 6 sub-libraries and each plate was screened in triplicate. Multiple control plasmids were included on each plate for reference. Following 24 hours of culture, average firefly luciferase levels, normalized to renilla luciferase, were calculated for each construct and an ANOVA was run for each sub-library to identify promoter/terminator combinations capable of significantly suppressing exon 13N inclusion, a direct proxy for functional U7 expression. Across libraries, 324/529 promoter/terminator combinations resulted in a statistically significant increase in luciferase activity (Tables 11-16). In line with previous findings that functional combinations are not obvious, even when combining elements from the same gene and species, there were many instances where a given promoter was only functional with the terminator of a different gene or species, suggesting there are unknown sequence determinants required for functional U7 expression. Together, these studies identify a suite of promoter/terminator combinations capable of driving high levels of functional U7 expression and expand the toolkit of regulatory elements for use of U7-mediated splice modulation.

1. An expression system for altering gene expression, comprising:
a silencing module deoxyribonucleic acid (DNA) sequence comprising: a first promoter sequence, an optional exonic splicing silencer (ESS) nucleic acid sequence, a antisense nucleic acid sequence that targets a target ribonucleic acid (RNA), an Sm binding site sequence, a 3′ hairpin sequence, and a 3′ terminator sequence, wherein the silencing module encodes a modified U7 small nuclear RNA (snRNA) that silences or reduces endogenous target protein expression; and
a target synthesis module DNA sequence comprising: a second promoter sequence, a 5′ untranslated region (UTR) sequence, a nucleic acid coding sequence (CDS) encoding the target, and a 3′ UTR sequence, wherein the target synthesis module encodes a recombinant messenger RNA (mRNA) that generates target protein.

2. The system of claim 1, wherein the DNA molecule of the silencing module comprises an arrayed series of silencing modules.

3. The system of claim 1, wherein the first promoter comprises a mouse U1 snRNA (“MmU1”) promoter, a mouse U2 snRNA (“MmU2”) promoter, a mouse U3 snRNA (“MmU3”) promoter, a mouse U4 snRNA (“MmU4”) promoter, a mouse U5 snRNA (“MmU5”) promoter, a mouse U6 snRNA (“MmU6”) promoter, a mouse U7 snRNA (“MmU7”) promoter, a mouse U11 snRNA (“MmU11”) promoter, a mouse U12 snRNA (“MmU12”) promoter, a mouse U7SK snRNA (“MmU7SK”) promoter, a human U1 snRNA (“HsU1”) promoter, a human U2 snRNA (“HsU2”) promoter, a human U3 snRNA (“HsU3”) promoter, a human U4 snRNA (“HsU4”) promoter, a human U5 snRNA (“HsU5”) promoter, a human U6 snRNA (“HsU6”) promoter, a human U7 snRNA (“HsU7”) promoter, a human U11 snRNA (“HsU11”) promoter, a human U12 snRNA (“HsU12”) promoter, a human U7SK snRNA (“HsU7SK”) promoter, or a functional combination of fragments thereof.

4. The system of claim 1, wherein the silencing module comprises the ESS.

5. The system of claim 4, wherein the ESS recruits a protein factor or group of factors that reduce or silence splicing of the endogenous target RNA.

6. The system of claim 1, wherein the antisense nucleic acid sequence is fully reverse complementary or partially reverse complementary to the targeted region.

7. The system of claim 1, wherein the targeted region is within an intron of the endogenous target RNA.

8. The system of claim 1, wherein the targeted region is within an exon of the endogenous target RNA.

9. The system of claim 1, wherein the antisense nucleic acid sequence targets an alternatively spliced exon of the endogenous target RNA.

10. The system of claim 1, wherein the targeted region is within 100 nucleotides of an intron/exon junction.

11. The system of claim 1, wherein the antisense nucleic acid sequence is 10-60 nucleotides in length.

12. The system of claim 1, wherein the silencing module further comprises an Sm binding site sequence.

13. The system of claim 1, wherein the hairpin sequence comprises a U7 small nuclear RNA (snRNA) 3′ hairpin sequence.

14. The system of claim 1, wherein the 3′ terminator sequence comprises a mouse U1 snRNA (“MmU1”) 3′ terminator sequence, a mouse U2 snRNA (“MmU2”) 3′ terminator sequence, a mouse U3 snRNA (“MmU3”) 3′ terminator sequence, a mouse U4 snRNA (“MmU4”) 3′ terminator sequence, a mouse U5 snRNA (“MmU5”) 3′ terminator sequence, a mouse U6 snRNA (“MmU6”) 3′ terminator sequence, a mouse U7 snRNA (“MmU7”) 3′ terminator sequence, a mouse U11 snRNA (“MmU11”) 3′ terminator sequence, a mouse U12 snRNA (“MmU12”) 3′ terminator sequence, a mouse U7SK snRNA (“MmU7SK”) 3′ terminator sequence, a human U1 snRNA (“HsU1”) 3′ terminator sequence, a human U2 snRNA (“HsU2”) 3′ terminator sequence, a human U3 snRNA (“HsU3”) 3′ terminator sequence, a human U4 snRNA (“HsU4”) 3′ terminator sequence, a human U5 snRNA (“HsU5”) 3′ terminator sequence, a human U6 snRNA (“HsU6”) 3′ terminator sequence, a human U7 snRNA (“HsU7”) 3′ terminator sequence, a human U11 snRNA (“HsU11”) 3′ terminator sequence, a human U12 snRNA (“HsU12”) 3′ terminator sequence, a human U7SK snRNA (“HsU7SK”) 3′ terminator sequence, or a functional combination of fragments thereof.

15. The system of claim 1, wherein the second promoter sequence comprises a weak promoter that drives expression of mRNA molecules at a rate no greater than an endogenous target promoter.

16. The system of claim 1, wherein the second promoter sequence comprises a promoter sequence of a -Ubc promoter, a PGK promoter, or an EF1a-core promoter.

17. The system of claim 1, wherein the synthesis module further comprises an SV40 intron sequence.

18. The system of claim 1, wherein the synthesis module further comprises a 5′ untranslated region (UTR) sequence of the target RNA.

19. The system of claim 1, wherein the synthesis module further comprises a Kozak sequence.

20. The system of claim 1, wherein the CDS comprises an intron.

21. The system of claim 1, wherein the CDS does not comprise an intron.

22. The system of claim 1, wherein the synthesis module comprises a polyA signal sequence.

23. The system of claim 22, wherein the polyA signal sequence comprises a -bGH signal sequence, a SV40 signal sequence, or a hGH polyA signal sequence.

24. The system of claim 1, wherein the silencing module reduces a target measurement in a cell or population of cells by at least 5%, at least 10%, at least 15%, at least 20%, at least 25%, at least 30%, at least 35%, at least 40%, at least 45%, at least 50%, at least 55%, at least 60%, at least 65%, at least 70%, at least 75%, or at least 80%, relative to a baseline target measurement.

25. The system of claim 1, wherein the synthesis module increases a target measurement in a cell or population of cells by at least 5%, at least 10%, at least 15%, at least 20%, at least 25%, at least 30%, at least 35%, at least 40%, at least 45%, at least 50%, at least 55%, at least 60%, at least 65%, at least 70%, at least 75%, at least 80%, at least 90%, at least 100%, at least 110%, at least 120%, at least 130%, at least 140%, at least 150%, at least 160%, at least 170%, at least 180%, at least 190%, at least 200%, at least 210%, at least 220%, at least 230%, at least 240%, or at least 250%, relative to a baseline target measurement.

26. The system of claim 1, wherein contact or expression of the system with a cell or cell population results in a target measurement between 1× and 2× relative to a control.

27. A dual RNA system for altering gene expression, comprising:
a U7 small nuclear RNA (snRNA) silencing module comprising: an exonic splicing silencer (ESS) nucleic acid sequence, a antisense nucleic acid sequence that binds a target ribonucleic acid (RNA), an Sm binding site sequence, and a 3′ hairpin sequence; and
a target messenger RNA (mRNA) synthesis module comprising: a 5′ untranslated region (UTR) sequence, a nucleic acid coding sequence (CDS) encoding the target, and a 3′ UTR sequence;
wherein the U7 snRNA silencing module silences or reduces endogenous target protein expression, and the target mRNA synthesis module generates target protein.

28. A system for altering gene expression, comprising:
a silencing module comprising an exonic splicing silencer (ESS) nucleic acid sequence coupled with a antisense nucleic acid sequence that targets an endogenous target ribonucleic acid (RNA); and
a synthesis module comprising a nucleic acid coding sequence (CDS) that encodes a recombinant version of the target RNA.

29. A pharmaceutical composition comprising the system of any one of claims 1-28, and a pharmaceutically acceptable carrier.

30. A method, comprising administering the pharmaceutical composition of claim 29 to a subject.

31. The method of claim 30, wherein the subject has been identified as having a genetic disease prior to the treatment.

32. The method of claim 31, wherein the genetic disease is associated with haploinsufficiency of the endogenous target RNA.

33. The method of claim 32, wherein the genetic disease is associated with tissue mosaic expression of the endogenous target RNA.

34. The method of claim 32, wherein the genetic disease comprises Rett syndrome.

35. A method, comprising:
suppressing protein expression of an endogenous target RNA in a first cell expressing the endogenous target RNA; and
synthesizing or enhancing protein expression of a recombinant version of the target RNA in a second cell that otherwise does not express the endogenous target RNA, or that expresses the endogenous target RNA at a low level.

36. The method of claim 35, further comprising synthesizing or enhancing protein expression of the recombinant version of the target RNA in the first cell.

37. The method of claim 35, wherein said suppressing is performed upon contacting the first cell with a silencing module or with a vector encoding the silencing module.

38. The method of claim 35, wherein suppressing protein expression comprises suppressing endogenous target protein expression by at least 10%.

39. The method of claim 35, wherein said synthesizing or enhancing recombinant target protein expression is performed upon contacting the second cell with a synthesis module or with a vector encoding the synthesis module.

40. The method of claim 35, wherein enhancing recombinant target protein expression comprises enhancing protein expression by at least 10%.

41. The method of claim 35, wherein the low level of expression of the endogenous target RNA in the second cell comprises an undetectable level, comprises a level below a desired level, comprises a level lower than a wild type cell, or comprises an expression lower than that of the first cell.

42. The method of claim 35, wherein the low level of expression of the endogenous target RNA in the second cell comprises a level at least 10% lower than that of the first cell.

43. The method of claim 35, wherein the silencing module and the synthesis module are encoded together in a nucleic acid construct.

44. The method of claim 43, wherein the nucleic acid construct is delivered to the first and second cell using one or more viral vectors.

45. The method of claim 35, wherein the silencing module and the synthesis module are encoded in separate nucleic acid constructs.

46. The method of claim 45, wherein the nucleic acid construct or the separate nucleic acid constructs are delivered to the cells using one or more viral vectors.

The application's sequence listing, which the Patent Office published only in electronic form, follows.

SEQUENCE LISTING (929 sequences)

SEQ ID NO: 1 - DNA, 400 bp, Homo sapiens
  source 1..400: mol_type = genomic DNA
ggcctccgcgccgggttttggcgcctcccgcgggcgcccccctcctcacggcgagcgctgccacgtcagacgaagggcgcagcgagcgtcctgatccttccgcccggacgctcaggacagcggcccgctgctcataagactcggccttagaaccccagtatcagcagaaggacattttaggacgggacttgggtgactctagggcactggttttctttccagagagcggaacaggcgaggaaaagtagtcccttctcggcgattctgcggagggatctccgtggggcggtgaacgccgatgattatataaggacgcgccgggtgtggcacagctagttccgtcgcagccgggatttgggtcgcggttcttgtttgtggatcgctgtgatcgtcacttggt

SEQ ID NO: 2 - DNA, 500 bp, Homo sapiens
  source 1..500: mol_type = genomic DNA
gggtaggggaggcgcttttcccaaggcagtctggagcatgcgctttagcagccccgctgggcacttggcgctacacaagtggcctctggcctcgcacacattccacatccaccggtaggcgccaaccggctccgttctttggtggccccttcgcgccaccttctactcctcccctagtcaggaagttcccccccgccccgcagctcgcgtcgtgcaggacgtgacaaatggaagtagcacgtctcactagtctcgtgcagatggacagcaccgctgagcaatggaagcgggtaggcctttggggcagcggccaatagcagctttgctccttcgctttctgggctcagaggctgggaaggggtgggtccgggggcgggctcaggggcgggctcaggggcggggcgggcgcccgaaggtcctccggaggcccggcattctgcacgcttcaaaagcgcacgtctgccgcgctgttctcctcttcctcatctccgggcctttcg

SEQ ID NO: 3 - DNA, 230 bp, Homo sapiens
  source 1..230: mol_type = genomic DNA
gctccggtgcccgtcagtgggcagagcgcacatcgcccacagtccccgagaagttggggggaggggtcggcaattgaaccggtgcctagagaaggtggcgcggggtaaactgggaaagtgatgtcgtgtactggctccgcctttttcccgagggtgggggagaaccgtatataagtgcagtagtcgccgtgaacgttctttttcgcaacgggtttgccgccagaacacag

SEQ ID NO: 4 - DNA, 499 bp, unidentified
  source 1..499: mol_type = unassigned DNA
ggcctccgcgccgggttttggcgcctcccgcgggcgcccccctcctcacggcgagcgctgccacgtcagacgaagggcgcagcgagcgtcctgatccttccgcccggacgctcaggacagcggcccgctgctcataagactcggccttagaaccccagtatcagcagaaggacattttaggacgggacttgggtgactctagggcactggttttctttccagagagcggaacaggcgaggaaaagtagtcccttctcggcgattctgcggagggatctccgtggggcggtgaacgccgatgattatataaggacgcgccgggtgtggcacagctagttccgtcgcagccgggatttgggtcgcggttcttgtttgtggatcgctgtgatcgtcacttggtcggtaagtttagtctttttgtcttttatttcaggtcccggatccggtggtggtgcaaatcaaagaactgctcctcagtggatgttgcctttacttctag

SEQ ID NO: 5 - RNA, 55 nt, Homo sapiens
  source 1..55: mol_type = other RNA
gcgcgcgctccctcctctcggagagagggctgtggtaaaagccgtccggaaaatg

SEQ ID NO: 6 - DNA, 1506 bp, Mus musculus
  source 1..1506: mol_type = genomic DNA
atggccgccgctgccgccaccgccgccgccgccgccgcgccgagcggaggaggaggaggaggcgaggaggagagactggaggaaaagtcagaagaccaggatctccagggcctcagagacaagccactgaagtttaagaaggcgaagaaagacaagaaggaggacaaagaaggcaagcatgagccactacaaccttcagcccaccattctgcagagccagcagaggcaggcaaagcagaaacatcagaaagctcaggctctgccccagcagtgccagaagcctcggcttcccccaaacagcggcgctccattatccgtgaccggggacctatgtatgatgaccccaccttgcctgaaggttggacacgaaagcttaaacaaaggaagtctggccgatctgctggaaagtatgatgtatatttgatcaatccccagggaaaagcttttcgctctaaagtagaattgattgcatactttgaaaaggtgggagacacctccttggaccctaatgattttgacttcacggtaactgggagagggagcccctccaggagagagcagaaaccacctaagaagcccaaatctcccaaagctccaggaactggcaggggtcggggacgccccaaagggagcggcactgggagaccaaaggcagcagcatcagaaggtgttcaggtgaaaagggtcctggagaagagccctgggaaacttgttgtcaagatgcctttccaagcatcgcctgggggtaagggtgagggaggtggggctaccacatctgcccaggtcatggtgatcaaacgccctggcagaaagcgaaaagctgaagctgacccccaggccattcctaagaaacggggtagaaagcctgggagtgtggtggcagctgctgcagctgaggccaaaaagaaagccgtgaaggagtcttccatacggtctgtgcatgagactgtgctccccatcaagaagcgcaagacccgggagacggtcagcatcgaggtcaaggaagtggtgaagcccctgctggtgtccacccttggtgagaaaagcgggaagggactgaagacctgcaagagccctgggcgtaaaagcaaggagagcagccccaaggggcgcagcagcagtgcctcctccccacctaagaaggagcaccatcatcaccaccatcactcagagtccacaaaggcccccatgccactgctcccatccccacccccacctgagcctgagagctctgaggaccccatcagcccccctgagcctcaggacttgagcagcagcatctgcaaagaagagaagatgccccgaggaggctcactggaaagcgatggctgccccaaggagccagctaagactcagcctatggtcgccaccactaccacagttgcagaaaagtacaaacaccgaggggagggagagcgcaaagacattgtttcatcttccatgccaaggccaaacagagaggagcctgtggacagccggacgcccgtgaccgagagagttagctga

SEQ ID NO: 7 - DNA, 1497 bp, Homo sapiens
  source 1..1497: mol_type = genomic DNA
atggccgccgccgccgccgccgcgccgagcggaggaggaggaggaggcgaggaggagagactggaagaaaagtcagaagaccaggacctccagggcctcaaggacaaacccctcaagtttaaaaaggtgaagaaagataagaaagaagagaaagagggcaagcatgagcccgtgcagccatcagcccaccactctgctgagcccgcagaggcaggcaaagcagagacatcagaagggtcaggctccgccccggctgtgccggaagcttctgcctcccccaaacagcggcgctccatcatccgtgaccggggacccatgtatgatgaccccaccctgcctgaaggctggacacggaagcttaagcaaaggaaatctggccgctctgctgggaagtatgatgtgtatttgatcaatccccagggaaaagcctttcgctctaaagtggagttgattgcgtacttcgaaaaggtaggcgacacatccctggaccctaatgattttgacttcacggtaactgggagagggagcccctcccggcgagagcagaaaccacctaagaagcccaaatctcccaaagctccaggaactggcagaggccggggacgccccaaagggagcggcaccacgagacccaaggcggccacgtcagagggtgtgcaggtgaaaagggtcctggagaaaagtcctgggaagctccttgtcaagatgccttttcaaacttcgccagggggcaaggctgaggggggtggggccaccacatccacccaggtcatggtgatcaaacgccccggcaggaagcgaaaagctgaggccgaccctcaggccattcccaagaaacggggccgaaagccggggagtgtggtggcagccgctgccgccgaggccaaaaagaaagccgtgaaggagtcttctatccgatctgtgcaggagaccgtactccccatcaagaagcgcaagacccgggagacggtcagcatcgaggtcaaggaagtggtgaagcccctgctggtgtccaccctcggtgagaagagcgggaaaggactgaagacctgtaagagccctgggcggaaaagcaaggagagcagccccaaggggcgcagcagcagcgcctcctcaccccccaagaaggagcaccaccaccatcaccaccactcagagtccccaaaggcccccgtgccactgctcccacccctgcccccacctccacctgagcccgagagctccgaggaccccaccagcccccctgagccccaggacttgagcagcagcgtctgcaaagaggagaagatgcccagaggaggctcactggagagcgacggctgccccaaggagccagctaagactcagcccgcggttgccaccgccgccacggccgcagaaaagtacaaacaccgaggggagggagagcgcaaagacattgtttcatcctccatgccaaggccaaacagagaggagcctgtggacagccggacgcccgtgaccgagagagttagctga

SEQ ID NO: 8 - DNA, 100 bp, Mus musculus
  source 1..100: mol_type = genomic DNA
gtgagtgggaccgccaaggccgcgggcggggacccttgctggggggcgggtaggggcgggacgtggcgcgggaggggcccgcggggtcgggcgacacggc

SEQ ID NO: 9 - DNA, 100 bp, Mus musculus
  source 1..100: mol_type = genomic DNA
agccaggggtctcatgtgtggcactcaagctcacctatactcactactgtgcagacagctgtgttctctgtaatacttacatatttgtttaatacttcag

SEQ ID NO: 10 - DNA, 100 bp, Mus musculus
  source 1..100: mol_type = genomic DNA
gtaagtaagagcaagtcttgtgtctatagaacaagaaggccaggtgggtaggaaggctaggatggaaaagctttattgcactgaaatggcttcccaaaaa

SEQ ID NO: 11 - DNA, 100 bp, Mus musculus
  source 1..100: mol_type = genomic DNA
atgtcttagaagaaagcttgtcagcatattttctatctcagtctctatgttgtcaaaaagcttctgactattgtttgtgtctctctgtttgtttctacag

SEQ ID NO: 12 - DNA, 100 bp, Homo sapiens
  source 1..100: mol_type = genomic DNA
gtgagtgggaccgccgtggccgcgggcggggacccttgccggggggcgggggtcaggggcgggacgtggcgcgggaggggcccgcggggtcggacgacac

SEQ ID NO: 13 - DNA, 100 bp, Homo sapiens
  source 1..100: mol_type = genomic DNA
ggggccttgcatgtggtgggggtccaagcctgcctctgctcacttgttctgcagactggcatgttctctgtgatacttacatacttgtttaacacttcag

SEQ ID NO: 14 - DNA, 100 bp, Homo sapiens
  source 1..100: mol_type = genomic DNA
gtaagtaagagcaactcctatctctacagggcagggagggcagggacaaggatccctcatggagcaggaaaatgtatgtgcccagggtggggtcgggggg

SEQ ID NO: 15 - DNA, 100 bp, Homo sapiens
  source 1..100: mol_type = genomic DNA
tttgtcagagcgttgtcaccaccatccgctctgccctatctctgacattgctatggagagcctctaattgttccttgtgtctttctgtttgtccccacag

SEQ ID NO: 16 - RNA, 407 nt, Homo sapiens
  source 1..407: mol_type = other RNA
ctttacacggagcggattgcaaagcaaaccaacaagaataaaggcagctgttgtctcttctcggccagaagtagctttgcacttttctaaactagaatccagaaacttgttcttccaaagcagagagcattatgaccaaatatcaccaggactgttactcaatgtgtgccgaaaatgactgaaagcactgatatatttaaaaacaaaaggcaatttattaaggaaatttgtaccatttcagtaaacctgtctgaatgtacctgtatacgtttcaaaaacaccccccccccactgaatccctgtaacctatttattatataaagagtttgccttataaatttacataaaaatgtccgtttgtgtcttttgttgtaaaaatcaagtgattttttcataaggttctttta

SEQ ID NO: 17 - RNA, 208 nt, Homo sapiens
  source 1..208: mol_type = other RNA
ctgtgccttctagttgccagccatctgttgtttgcccctcccccgtgccttccttgaccctggaaggtgccactcccactgtcctttcctaataaaatgaggaaattgcatcgcattgtctgagtaggtgtcattctattctggggggtggggtggggcaggacagcaagggggaggattgggaagacaatagcaggcatgctgggga

SEQ ID NO: 18 - RNA, 45 nt, Homo sapiens
  source 1..45: mol_type = unassigned RNA
annaatttttggagcaggttttctgacttcggtcggaaaacccct

SEQ ID NO: 19 - DNA, 255 bp, Mus musculus
  source 1..255: mol_type = genomic DNA
aacaacataggagctgtgattggctgttttcagccaatcagcactgactcatttgcatagcctttacaagcggtcacaaactcaagaaacgagcggttttaatagtcttttagaatattgtttatcgaaccgaataaggaactgtgctttgtgattcacatatcagtggaggggtgtggaaatggcaccttgatctcaccctcatcgaaagtggagttgatgtccttccctggctcgctacagacgcacttccgc

SEQ ID NO: 20 - DNA, 411 bp, Mus musculus
  source 1..411: mol_type = genomic DNA
taaagactgtgcatccgactcctacatttatgaaagtaaatgcctattgttagaacaaaaaaggctacagaacaaaaaacaaagcgaaataccatctgctttaggttcagtggtattttcccgctgacagggaggcgggtttttgggtacaggaaacgagtcactatggaggcggtactatgtagatgagaattcaggagcaaactgggaaaagcaactgcttccaaatatttgtgatttttacagtgtagttttggaaaaactcttagcctaccaattcttctaagtgttttaaaatgtgggagccagtacacatgaagttatagagtgttttaatgaggcttaaatatttaccgtaactatgaaatgctacgcatatcatgctgttcaggctccgtggccacgcaactc

SEQ ID NO: 21 - DNA, 297 bp, Homo sapiens
  source 1..297: mol_type = genomic DNA
aacaacataggagctgtgattggctgttttcagccaatcagcactgactcagggcgacttctatgtagatgaggcagcgcagaggctgctgcctttacaagcggtcacaaactcaagaaacgagcggttttaatagtcttttagaatattgtttatcgaaccgaataaggaactgtgctttgtgattcacatatcagtggaggggtgtggaaatggcaccttgatgggagtgcgcgaggcaagtgaccgtgtgtggagttgatgtccttccctggctcgctacagacgcacttccgc

SEQ ID NO: 22 - DNA, 286 bp, Mus musculus
  source 1..286: mol_type = other DNA
aacaacataggagctgtgattggctgttttcagccaatcagcactgactcagggcgacttctatgtagatgaggcagcgcagaggctgctgcctttacaagcggtcacaaactcaagaaacgagcggttttaatagtcttttagaatattgtttatcgaaccgaataaggaactgtgctttgtgattcacatatcagtggaggggtgtggaaatggcaccttgatttaccgtaactatgaaatggagttgatgtccttccctggctcgctacagacgcacttccgc

SEQ ID NO: 23 - DNA, 104 bp, Mus musculus
  source 1..104: mol_type = unassigned DNA
cccaatttcactggtctacaatgaaagcaaaacagttctcttccccgctccccggtgtgtgagaggggctttgatccttctctggtttcctaggaaacgcgtat

SEQ ID NO: 24 - DNA, 35 bp, Homo sapiens
  source 1..35: mol_type = unassigned DNA
actttctggagtttcaaaagtagactgtacgctaa

SEQ ID NO: 25 - DNA, 141 bp, unidentified
  source 1..141: mol_type = other DNA
cctgcaggcagctgcgcgctcgctcgctcactgaggccgcccgggcaaagcccgggcgtcgggcgacctttggtcgcccggcctcagtgagcgagcgagcgcgcagagagggagtggccaactccatcactaggggttcct

SEQ ID NO: 26 - RNA, 20 nt, Mus musculus
  source 1..20: mol_type = unassigned RNA
gcccctggctcgcctcctct

SEQ ID NO: 27 - RNA, 20 nt, Mus musculus
  source 1..20: mol_type = unassigned RNA
ggcggaggaaaccatcatat

SEQ ID NO: 28 - RNA, 20 nt, Mus musculus
  source 1..20: mol_type = unassigned RNA
gagacaatagaccttagtaa

SEQ ID NO: 29 - RNA, 20 nt, Mus musculus
  source 1..20: mol_type = unassigned RNA
ggcccacttcgcggtgtaat

SEQ ID NO: 30 - RNA, 20 nt, Mus musculus
  source 1..20: mol_type = unassigned RNA
tcctcctcctccgctcggcg

SEQ ID NO: 31 - RNA, 20 nt, Mus musculus
  source 1..20: mol_type = unassigned RNA
agtctctcctcctcgcctcc

SEQ ID NO: 32 - RNA, 20 nt, Mus musculus
  source 1..20: mol_type = unassigned RNA
gccttggcggtcccactcac

SEQ ID NO: 33 - RNA, 20 nt, Mus musculus
  source 1..20: mol_type = unassigned RNA
agcaagggtccccgcccgcg

SEQ ID NO: 34 - RNA, 24 nt, Mus musculus
  source 1..24: mol_type = unassigned RNA
tcctcctcctccgctcggcgcggc

SEQ ID NO: 35 - RNA, 24 nt, Mus musculus
  source 1..24: mol_type = unassigned RNA
agtctctcctcctcgcctcctcct

SEQ ID NO: 36 - RNA, 24 nt, Mus musculus
  source 1..24: mol_type = unassigned RNA
gccttggcggtcccactcacagtc

SEQ ID NO: 37 - RNA, 24 nt, Mus musculus
  source 1..24: mol_type = unassigned RNA
agcaagggtccccgcccgcggcct

SEQ ID NO: 38 - RNA, 26 nt, Mus musculus
  source 1..26: mol_type = unassigned RNA
tcctcctcctccgctcggcgcggcgg

SEQ ID NO: 39 - RNA, 26 nt, Mus musculus
  source 1..26: mol_type = unassigned RNA
agtctctcctcctcgcctcctcctcc

SEQ ID NO: 40 - RNA, 26 nt, Mus musculus
  source 1..26: mol_type = unassigned RNA
gccttggcggtcccactcacagtctc

SEQ ID NO: 41 - RNA, 26 nt, Mus musculus
  source 1..26: mol_type = unassigned RNA
agcaagggtccccgcccgcggccttg

SEQ ID NO: 42 - RNA, 30 nt, Mus musculus
  source 1..30: mol_type = unassigned RNA
tcctcctcctccgctcggcgcggcggcggc

SEQ ID NO: 43 - RNA, 30 nt, Mus musculus
  source 1..30: mol_type = unassigned RNA
agtctctcctcctcgcctcctcctcctcct

SEQ ID NO: 44 - RNA, 30 nt, Mus musculus
  source 1..30: mol_type = unassigned RNA
gccttggcggtcccactcacagtctctcct

SEQ ID NO: 45 - RNA, 30 nt, Mus musculus
  source 1..30: mol_type = unassigned RNA
agcaagggtccccgcccgcggccttggcgg

SEQ ID NO: 46 - RNA, 20 nt, Mus musculus
  source 1..20: mol_type = unassigned RNA
agttgaaagtccccattgag

SEQ ID NO: 47 - RNA, 20 nt, Mus musculus
  source 1..20: mol_type = unassigned RNA
ctaaaacaaagaaaatcgta

SEQ ID NO: 48 - RNA, 20 nt, Mus musculus
  source 1..20: mol_type = unassigned RNA
agtctgtatttttatggagc

SEQ ID NO: 49 - RNA, 20 nt, Mus musculus
  source 1..20: mol_type = unassigned RNA
catcaaagcaggaactggtg

SEQ ID NO: 50 - RNA, 24 nt, Mus musculus
  source 1..24: mol_type = unassigned RNA
agttgaaagtccccattgagctgc

SEQ ID NO: 51 - RNA, 24 nt, Mus musculus
  source 1..24: mol_type = unassigned RNA
ctaaaacaaagaaaatcgtaagtt

SEQ ID NO: 52 - RNA, 24 nt, Mus musculus
  source 1..24: mol_type = unassigned RNA
agtctgtatttttatggagcctaa

SEQ ID NO: 53 - RNA, 24 nt, Mus musculus
  source 1..24: mol_type = unassigned RNA
catcaaagcaggaactggtgagtc

SEQ ID NO: 54 - RNA, 26 nt, Mus musculus
  source 1..26: mol_type = unassigned RNA
agttgaaagtccccattgagctgcac

SEQ ID NO: 55 - RNA, 26 nt, Mus musculus
  source 1..26: mol_type = unassigned RNA
ctaaaacaaagaaaatcgtaagttga

SEQ ID NO: 56 - RNA, 26 nt, Mus musculus
  source 1..26: mol_type = unassigned RNA
agtctgtatttttatggagcctaaaa

SEQ ID NO: 57 - RNA, 26 nt, Mus musculus
  source 1..26: mol_type = unassigned RNA
catcaaagcaggaactggtgagtctg

SEQ ID NO: 58 - RNA, 30 nt, Mus musculus
  source 1..30: mol_type = unassigned RNA
agttgaaagtccccattgagctgcaccttt

SEQ ID NO: 59 - RNA, 30 nt, Mus musculus
  source 1..30: mol_type = unassigned RNA
ctaaaacaaagaaaatcgtaagttgaaagt

SEQ ID NO: 60 - RNA, 30 nt, Mus musculus
  source 1..30: mol_type = unassigned RNA
agtctgtatttttatggagcctaaaacaaa

SEQ ID NO: 61 - RNA, 30 nt, Mus musculus
  source 1..30: mol_type = unassigned RNA
catcaaagcaggaactggtgagtctgtatt

SEQ ID NO: 62 - RNA, 20 nt, Mus musculus
  source 1..20: mol_type = unassigned RNA
taccatggaatcctgttgga

SEQ ID NO: 63 - RNA, 20 nt, Mus musculus
  source 1..20: mol_type = unassigned RNA
ctgagccctaacatcccagc

SEQ ID NO: 64 - RNA, 20 nt, Mus musculus
  source 1..20: mol_type = unassigned RNA
ggaaggttacttacctgagc

SEQ ID NO: 65 - RNA, 24 nt, Mus musculus
  source 1..24: mol_type = unassigned RNA
taccatggaatcctgttggagctg

SEQ ID NO: 66 - RNA, 24 nt, Mus musculus
  source 1..24: mol_type = unassigned RNA
ctgagccctaacatcccagctacc

SEQ ID NO: 67 - RNA, 24 nt, Mus musculus
  source 1..24: mol_type = unassigned RNA
aggaaggttacttacctgagccct

SEQ ID NO: 68 - RNA, 26 nt, Mus musculus
  source 1..26: mol_type = unassigned RNA
taccatggaatcctgttggagctggt

SEQ ID NO: 69 - RNA, 26 nt, Mus musculus
  source 1..26: mol_type = unassigned RNA
ctgagccctaacatcccagctaccat

SEQ ID NO: 70 - RNA, 26 nt, Mus musculus
  source 1..26: mol_type = unassigned RNA
aggaaggttacttacctgagccctaa

SEQ ID NO: 71 - RNA, 30 nt, Mus musculus
  source 1..30: mol_type = unassigned RNA
taccatggaatcctgttggagctggtctac

SEQ ID NO: 72 - RNA, 30 nt, Mus musculus
  source 1..30: mol_type = unassigned RNA
ctgagccctaacatcccagctaccatggaa

SEQ ID NO: 73 - RNA, 30 nt, Mus musculus
  source 1..30: mol_type = unassigned RNA
aaggaaggttacttacctgagccctaacat

SEQ ID NO: 74 - RNA, 20 nt, Mus musculus
  source 1..20: mol_type = unassigned RNA
gtaagtattacagagaacac

SEQ ID NO: 75 - RNA, 20 nt, Mus musculus
  source 1..20: mol_type = unassigned RNA
ctgaagtattaaacaaatat

SEQ ID NO: 76 - RNA, 20 nt, Mus musculus
  source 1..20: mol_type = unassigned RNA
ggtcttctgacttttcctcc

SEQ ID NO: 77 - RNA, 20 nt, Mus musculus
  source 1..20: mol_type = unassigned RNA
tctgaggccctggagatcct

SEQ ID NO: 78 - RNA, 24 nt, Mus musculus
  source 1..24: mol_type = unassigned RNA
gtaagtattacagagaacacagct

SEQ ID NO: 79 - RNA, 24 nt, Mus musculus
  source 1..24: mol_type = unassigned RNA
ctgaagtattaaacaaatatgtaa

SEQ ID NO: 80 - RNA, 24 nt, Mus musculus
  source 1..24: mol_type = unassigned RNA
ggtcttctgacttttcctccctga

SEQ ID NO: 81 - RNA, 24 nt, Mus musculus
  source 1..24: mol_type = unassigned RNA
tctgaggccctggagatcctggtc

SEQ ID NO: 82 - RNA, 26 nt, Mus musculus
  source 1..26: mol_type = unassigned RNA
gtaagtattacagagaacacagctgt

SEQ ID NO: 83 - RNA, 26 nt, Mus musculus
  source 1..26: mol_type = unassigned RNA
ctgaagtattaaacaaatatgtaagt

SEQ ID NO: 84 - RNA, 26 nt, Mus musculus
  source 1..26: mol_type = unassigned RNA
ggtcttctgacttttcctccctgaag

SEQ ID NO: 85 - RNA, 26 nt, Mus musculus
  source 1..26: mol_type = unassigned RNA
tctgaggccctggagatcctggtctt

SEQ ID NO: 86 - RNA, 30 nt, Mus musculus
  source 1..30: mol_type = unassigned RNA
gtaagtattacagagaacacagctgtctgc

SEQ ID NO: 87 - RNA, 30 nt, Mus musculus
  source 1..30: mol_type = unassigned RNA
ctgaagtattaaacaaatatgtaagtatta

SEQ ID NO: 88 - RNA, 30 nt, Mus musculus
  source 1..30: mol_type = unassigned RNA
ggtcttctgacttttcctccctgaagtatt

SEQ ID NO: 89 - RNA, 30 nt, Mus musculus
  source 1..30: mol_type = unassigned RNA
tctgaggccctggagatcctggtcttctga

SEQ ID NO: 90 - RNA, 20 nt, Mus musculus
  source 1..20: mol_type = unassigned RNA
ctttccagcagatcggccag

SEQ ID NO: 91 - RNA, 20 nt, Mus musculus
  source 1..20: mol_type = unassigned RNA
ttgatcaaatatacatcata

SEQ ID NO: 92 - RNA, 20 nt, Mus musculus
  source 1..20: mol_type = unassigned RNA
caagacttgctcttacttac

SEQ ID NO: 93 - RNA, 20 nt, Mus musculus
  source 1..20: mol_type = unassigned RNA
gccttcttgttctatagaca

SEQ ID NO: 94 - RNA, 24 nt, Mus musculus
  source 1..24: mol_type = unassigned RNA
ctttccagcagatcggccagactt

SEQ ID NO: 95 - RNA, 24 nt, Mus musculus
  source 1..24: mol_type = unassigned RNA
ttgatcaaatatacatcatacttt

SEQ ID NO: 96 - RNA, 24 nt, Mus musculus
  source 1..24: mol_type = unassigned RNA
caagacttgctcttacttacttga

SEQ ID NO: 97 - RNA, 24 nt, Mus musculus
  source 1..24: mol_type = unassigned RNA
gccttcttgttctatagacacaag

SEQ ID NO: 98 - RNA, 26 nt, Mus musculus
  source 1..26: mol_type = unassigned RNA
ctttccagcagatcggccagacttcc

SEQ ID NO: 99 - RNA, 26 nt, Mus musculus
  source 1..26: mol_type = unassigned RNA
ttgatcaaatatacatcatactttcc

SEQ ID NO: 100 - RNA, 26 nt, Mus musculus
  source 1..26: mol_type = unassigned RNA
caagacttgctcttacttacttgatc

SEQ ID NO: 101 - RNA, 26 nt, Mus musculus
  source 1..26: mol_type = unassigned RNA
gccttcttgttctatagacacaagac

SEQ ID NO: 102 - RNA, 30 nt, Mus musculus
  source 1..30: mol_type = unassigned RNA
ctttccagcagatcggccagacttcctttg

SEQ ID NO: 103 - RNA, 30 nt, Mus musculus
  source 1..30: mol_type = unassigned RNA
ttgatcaaatatacatcatactttccagca

SEQ ID NO: 104 - RNA, 30 nt, Mus musculus
  source 1..30: mol_type = unassigned RNA
caagacttgctcttacttacttgatcaaat

SEQ ID NO: 105 - RNA, 30 nt, Mus musculus
  source 1..30: mol_type = unassigned RNA
gccttcttgttctatagacacaagacttgc

SEQ ID NO: 106 - RNA, 20 nt, Mus musculus
  source 1..20: mol_type = unassigned RNA
acacaaacaatagtcagaag

SEQ ID NO: 107 - RNA, 20 nt, Mus musculus
  source 1..20: mol_type = unassigned RNA
ctgtagaaacaaacagagag

SEQ ID NO: 108 - RNA, 20 nt, Mus musculus
  source 1..20: mol_type = unassigned RNA
gaaaagcttttccctgggga

SEQ ID NO: 109 - RNA, 20 nt, Mus musculus
  source 1..20: mol_type = unassigned RNA
aatcaattctactttagagc

SEQ ID NO: 110 - RNA, 24 nt, Mus musculus
  source 1..24: mol_type = unassigned RNA
acacaaacaatagtcagaagcttt

SEQ ID NO: 111 - RNA, 24 nt, Mus musculus
  source 1..24: mol_type = unassigned RNA
ctgtagaaacaaacagagagacac

SEQ ID NO: 112 - RNA, 24 nt, Mus musculus
  source 1..24: mol_type = unassigned RNA
gaaaagcttttccctggggactgt

SEQ ID NO: 113 - RNA, 24 nt, Mus musculus
  source 1..24: mol_type = unassigned RNA
aatcaattctactttagagcgaaa

SEQ ID NO: 114 - RNA, 26 nt, Mus musculus
  source 1..26: mol_type = unassigned RNA
acacaaacaatagtcagaagcttttt

SEQ ID NO: 115 - RNA, 26 nt, Mus musculus
  source 1..26: mol_type = unassigned RNA
ctgtagaaacaaacagagagacacaa

SEQ ID NO: 116 - RNA, 26 nt, Mus musculus
  source 1..26: mol_type = unassigned RNA
gaaaagcttttccctggggactgtag

SEQ ID NO: 117 - RNA, 26 nt, Mus musculus
  source 1..26: mol_type = unassigned RNA
aatcaattctactttagagcgaaaag

SEQ ID NO: 118 - RNA, 30 nt, Mus musculus
  source 1..30: mol_type = unassigned RNA
acacaaacaatagtcagaagctttttgaca

SEQ ID NO: 119 - RNA, 30 nt, Mus musculus
  source 1..30: mol_type = unassigned RNA
ctgtagaaacaaacagagagacacaaacaa

SEQ ID NO: 120 - RNA, 30 nt, Mus musculus
  source 1..30: mol_type = unassigned RNA
gaaaagcttttccctggggactgtagaaac

SEQ ID NO: 121 - RNA, 30 nt, Mus musculus
  source 1..30: mol_type = unassigned RNA
aatcaattctactttagagcgaaaagcttt

SEQ ID NO: 122 - RNA, 20 nt, Homo sapiens
  source 1..20: mol_type = unassigned RNA
gcccctggctcgcctcctct

SEQ ID NO: 123 - RNA, 20 nt, Homo sapiens
  source 1..20: mol_type = unassigned RNA
ggcggaggaaaccatcatat

SEQ ID NO: 124 - RNA, 20 nt, Homo sapiens
  source 1..20: mol_type = unassigned RNA
gagacaatagaccttagtaa

SEQ ID NO: 125 - RNA, 20 nt, Homo sapiens
  source 1..20: mol_type = unassigned RNA
ggcccacttcgcggtgtaat

SEQ ID NO: 126 - RNA, 20 nt, Homo sapiens
  source 1..20: mol_type = unassigned RNA
tcctcctcctccgctcggcg

SEQ ID NO: 127 - RNA, 20 nt, Homo sapiens
  source 1..20: mol_type = unassigned RNA
agtctctcctcctcgcctcc

SEQ ID NO: 128 - RNA, 20 nt, Homo sapiens
  source 1..20: mol_type = unassigned RNA
gccacggcggtcccactcac

SEQ ID NO: 129 - RNA, 20 nt, Homo sapiens
  source 1..20: mol_type = unassigned RNA
ggcaagggtccccgcccgcg

SEQ ID NO: 130 - RNA, 24 nt, Homo sapiens
  source 1..24: mol_type = unassigned RNA
tcctcctcctccgctcggcgcggc

SEQ ID NO: 131 - RNA, 24 nt, Homo sapiens
  source 1..24: mol_type = unassigned RNA
agtctctcctcctcgcctcctcct

SEQ ID NO: 132 - RNA, 24 nt, Homo sapiens
  source 1..24: mol_type = unassigned RNA
gccacggcggtcccactcacagtc

SEQ ID NO: 133 - RNA, 24 nt, Homo sapiens
  source 1..24: mol_type = unassigned RNA
ggcaagggtccccgcccgcggcca

SEQ ID NO: 134 - RNA, 26 nt, Homo sapiens
  source 1..26: mol_type = unassigned RNA
tcctcctcctccgctcggcgcggcgg

SEQ ID NO: 135 - RNA, 26 nt, Homo sapiens
  source 1..26: mol_type = unassigned RNA
agtctctcctcctcgcctcctcctcc

SEQ ID NO: 136 - RNA, 26 nt, Homo sapiens
  source 1..26: mol_type = unassigned RNA
gccacggcggtcccactcacagtctc

SEQ ID NO: 137 - RNA, 26 nt, Homo sapiens
  source 1..26: mol_type = unassigned RNA
ggcaagggtccccgcccgcggccacg

SEQ ID NO: 138 - RNA, 30 nt, Homo sapiens; identical to SEQ ID NO: 42
  source 1..30: mol_type = unassigned RNA

SEQ ID NO: 139 - RNA, 30 nt, Homo sapiens; identical to SEQ ID NO: 43
  source 1..30: mol_type = unassigned RNA

SEQ ID NO: 140 - RNA, 30 nt, Homo sapiens
  source 1..30: mol_type = unassigned RNA
gccacggcggtcccactcacagtctctcct

SEQ ID NO: 141 - RNA, 30 nt, Homo sapiens
  source 1..30: mol_type = unassigned RNA
ggcaagggtccccgcccgcggccacggcgg

SEQ ID NO: 142 - RNA, 20 nt, Homo sapiens
  source 1..20: mol_type = unassigned RNA
agttgaaagcccccattgag

SEQ ID NO: 143 - RNA, 20 nt, Homo sapiens
  source 1..20: mol_type = unassigned RNA
ctaaaacaaagaaaattgta

SEQ ID NO: 144 - RNA, 20 nt, Homo sapiens
  source 1..20: mol_type = unassigned RNA
agtctgtatttttatggagc

SEQ ID NO: 145 - RNA, 20 nt, Homo sapiens
  source 1..20: mol_type = unassigned RNA
catcaaagcaggaactggtg

SEQ ID NO: 146 - RNA, 24 nt, Homo sapiens
  source 1..24: mol_type = unassigned RNA
agttgaaagcccccattgagctgc

SEQ ID NO: 147 - RNA, 24 nt, Homo sapiens
  source 1..24: mol_type = unassigned RNA
ctaaaacaaagaaaattgtaagtt

SEQ ID NO: 148 - RNA, 24 nt, Homo sapiens
  source 1..24: mol_type = unassigned RNA
agtctgtatttttatggagcctaa

SEQ ID NO: 149 - RNA, 24 nt, Homo sapiens
  source 1..24: mol_type = unassigned RNA
catcaaagcaggaactggtgagtc

SEQ ID NO: 150 - RNA, 26 nt, Homo sapiens
  source 1..26: mol_type = unassigned RNA
agttgaaagcccccattgagctgcac

SEQ ID NO: 151 - RNA, 26 nt, Homo sapiens
  source 1..26: mol_type = unassigned RNA
ctaaaacaaagaaaattgtaagttga

SEQ ID NO: 152 - RNA, 26 nt, Homo sapiens
  source 1..26: mol_type = unassigned RNA
agtctgtatttttatggagcctaaaa

SEQ ID NO: 153 - RNA, 26 nt, Homo sapiens
  source 1..26: mol_type = unassigned RNA
catcaaagcaggaactggtgagtctg

SEQ ID NO: 154 - RNA, 30 nt, Homo sapiens
  source 1..30: mol_type = unassigned RNA
agttgaaagcccccattgagctgcacgacc

SEQ ID NO: 155 - RNA, 30 nt, Homo sapiens
  source 1..30: mol_type = unassigned RNA
ctaaaacaaagaaaattgtaagttgaaagc

SEQ ID NO: 156 - RNA, 30 nt, Homo sapiens; identical to SEQ ID NO: 60
  source 1..30: mol_type = unassigned RNA

SEQ ID NO: 157 - RNA, 30 nt, Homo sapiens; identical to SEQ ID NO: 61
  source 1..30: mol_type = unassigned RNA

SEQ ID NO: 158 - RNA, 20 nt, Homo sapiens
  source 1..20: mol_type = unassigned RNA
taccatggaatcctgttgga

SEQ ID NO: 159 - RNA, 20 nt, Homo sapiens
  source 1..20: mol_type = unassigned RNA
ctgagccctaacatcccagc

SEQ ID NO: 160 - RNA, 20 nt, Homo sapiens
  source 1..20: mol_type = unassigned RNA
ggaaggttacttacctgagc

SEQ ID NO: 161 - RNA, 24 nt, Homo sapiens
  source 1..24: mol_type = unassigned RNA
taccatggaatcctgttggagctg

SEQ ID NO: 162 - RNA, 24 nt, Homo sapiens
  source 1..24: mol_type = unassigned RNA
ctgagccctaacatcccagctacc

SEQ ID NO: 163 - RNA, 24 nt, Homo sapiens
  source 1..24: mol_type = unassigned RNA
aggaaggttacttacctgagccct

SEQ ID NO: 164 - RNA, 26 nt, Homo sapiens
  source 1..26: mol_type = unassigned RNA
taccatggaatcctgttggagctggt

SEQ ID NO: 165 - RNA, 26 nt, Homo sapiens
  source 1..26: mol_type = unassigned RNA
ctgagccctaacatcccagctaccat

SEQ ID NO: 166 - RNA, 26 nt, Homo sapiens
  source 1..26: mol_type = unassigned RNA
aggaaggttacttacctgagccctaa

SEQ ID NO: 167 - RNA, 30 nt, Homo sapiens; identical to SEQ ID NO: 71
  source 1..30: mol_type = unassigned RNA

SEQ ID NO: 168 - RNA, 30 nt, Homo sapiens; identical to SEQ ID NO: 72
  source 1..30: mol_type = unassigned RNA

SEQ ID NO: 169 - RNA, 30 nt, Homo sapiens; identical to SEQ ID NO: 73
  source 1..30: mol_type = unassigned RNA

SEQ ID NO: 170 - RNA, 20 nt, Homo sapiens
  source 1..20: mol_type = unassigned RNA
gtaagtatcacagagaacat

SEQ ID NO: 171 - RNA, 20 nt, Homo sapiens
  source 1..20: mol_type = unassigned RNA
ctgaagtgttaaacaagtat

SEQ ID NO: 172 - RNA, 20 nt, Homo sapiens
  source 1..20: mol_type = unassigned RNA
ggtcttctgacttttcttcc

SEQ ID NO: 173 - RNA, 20 nt, Homo sapiens
  source 1..20: mol_type = unassigned RNA
cttgaggccctggaggtcct

SEQ ID NO: 174 - RNA, 24 nt, Homo sapiens
  source 1..24: mol_type = unassigned RNA
gtaagtatcacagagaacatgcca

SEQ ID NO: 175 - RNA, 24 nt, Homo sapiens
  source 1..24: mol_type = unassigned RNA
ctgaagtgttaaacaagtatgtaa

SEQ ID NO: 176 - RNA, 24 nt, Homo sapiens
  source 1..24: mol_type = unassigned RNA
ggtcttctgacttttcttccctga

SEQ ID NO: 177 - RNA, 24 nt, Homo sapiens
  source 1..24: mol_type = unassigned RNA
cttgaggccctggaggtcctggtc

SEQ ID NO: 178 - RNA, 26 nt, Homo sapiens
  source 1..26: mol_type = unassigned RNA
gtaagtatcacagagaacatgccagt

SEQ ID NO: 179 - RNA, 26 nt, Homo sapiens
  source 1..26: mol_type = unassigned RNA
ctgaagtgttaaacaagtatgtaagt

SEQ ID NO: 180 - RNA, 26 nt, Homo sapiens
  source 1..26: mol_type = unassigned RNA
ggtcttctgacttttcttccctgaag

SEQ ID NO: 181 - RNA, 26 nt, Homo sapiens
  source 1..26: mol_type = unassigned RNA
cttgaggccctggaggtcctggtctt

SEQ ID NO: 182 - RNA, 30 nt, Homo sapiens
  source 1..30: mol_type = unassigned RNA
gtaagtatcacagagaacatgccagtctgc

SEQ ID NO: 183 - RNA, 30 nt, Homo sapiens
  source 1..30: mol_type = unassigned RNA
ctgaagtgttaaacaagtatgtaagtatca

SEQ ID NO: 184 - RNA, 30 nt, Homo sapiens
  source 1..30: mol_type = unassigned RNA
ggtcttctgacttttcttccctgaagtgtt

SEQ ID NO: 185 - RNA, 30 nt, Homo sapiens
  source 1..30: mol_type = unassigned RNA
cttgaggccctggaggtcctggtcttctga

SEQ ID NO: 186 - RNA, 20 nt, Homo sapiens
  source 1..20: mol_type = unassigned RNA
cttcccagcagagcggccag

SEQ ID NO: 187 - RNA, 20 nt, Homo sapiens
  source 1..20: mol_type = unassigned RNA
ttgatcaaatacacatcata

SEQ ID NO: 188 - RNA, 20 nt, Homo sapiens
  source 1..20: mol_type = unassigned RNA
taggagttgctcttacttac

SEQ ID NO: 189 - RNA, 20 nt, Homo sapiens
  source 1..20: mol_type = unassigned RNA
ccctccctgccctgtagaga

SEQ ID NO: 190 - RNA, 24 nt, Homo sapiens
  source 1..24: mol_type = unassigned RNA
cttcccagcagagcggccagattt

SEQ ID NO: 191 - RNA, 24 nt, Homo sapiens
  source 1..24: mol_type = unassigned RNA
ttgatcaaatacacatcatacttc

SEQ ID NO: 192 - RNA, 24 nt, Homo sapiens
  source 1..24: mol_type = unassigned RNA
taggagttgctcttacttacttga

SEQ ID NO: 193 - RNA, 24 nt, Homo sapiens
  source 1..24: mol_type = unassigned RNA
ccctccctgccctgtagagatagg

SEQ ID NO: 194 - RNA, 26 nt, Homo sapiens
  source 1..26: mol_type = unassigned RNA
cttcccagcagagcggccagatttcc

SEQ ID NO: 195 - RNA, 26 nt, Homo sapiens
  source 1..26: mol_type = unassigned RNA
ttgatcaaatacacatcatacttccc

SEQ ID NO: 196 - RNA, 26 nt, Homo sapiens
  source 1..26: mol_type = unassigned RNA
taggagttgctcttacttacttgatc

SEQ ID NO: 197 - RNA, 26 nt, Homo sapiens
  source 1..26: mol_type = unassigned RNA
ccctccctgccctgtagagataggag

SEQ ID NO: 198 - RNA, 30 nt, Homo sapiens
  source 1..30: mol_type = unassigned RNA
cttcccagcagagcggccagatttcctttg

SEQ ID NO: 199 - RNA, 30 nt, Homo sapiens
  source 1..30: mol_type = unassigned RNA
ttgatcaaatacacatcatacttcccagca

SEQ ID NO: 200 - RNA, 30 nt, Homo sapiens
  source 1..30: mol_type = unassigned RNA
taggagttgctcttacttacttgatcaaat

SEQ ID NO: 201 - RNA, 30 nt, Homo sapiens
  source 1..30: mol_type = unassigned RNA
ccctccctgccctgtagagataggagttgc

SEQ ID NO: 202 - RNA, 20 nt, Homo sapiens
  source 1..20: mol_type = unassigned RNA
acacaaggaacaattagagg

SEQ ID NO: 203 - RNA, 20 nt, Homo sapiens
  source 1..20: mol_type = unassigned RNA
ctgtggggacaaacagaaag

SEQ ID NO: 204 - RNA, 20 nt, Homo sapiens
  source 1..20: mol_type = unassigned RNA
gaaaggcttttccctgggga

SEQ ID NO: 205 - RNA, 20 nt, Homo sapiens
  source 1..20: mol_type = unassigned RNA
aatcaactccactttagagc

SEQ ID NO: 206 - RNA, 24 nt, Homo sapiens
  source 1..24: mol_type = unassigned RNA
acacaaggaacaattagaggctct

SEQ ID NO: 207 - RNA, 24 nt, Homo sapiens
  source 1..24: mol_type = unassigned RNA
ctgtggggacaaacagaaagacac

SEQ ID NO: 208 - RNA, 24 nt, Homo sapiens
  source 1..24: mol_type = unassigned RNA
gaaaggcttttccctggggactgt

SEQ ID NO: 209 - RNA, 24 nt, Homo sapiens
  source 1..24: mol_type = unassigned RNA
aatcaactccactttagagcgaaa

SEQ ID NO: 210 - RNA, 26 nt, Homo sapiens
  source 1..26: mol_type = unassigned RNA
acacaaggaacaattagaggctctcc

SEQ ID NO: 211 - RNA, 26 nt, Homo sapiens
  source 1..26: mol_type = unassigned RNA
ctgtggggacaaacagaaagacacaa

SEQ ID NO: 212 - RNA, 26 nt, Homo sapiens
  source 1..26: mol_type = unassigned RNA
gaaaggcttttccctggggactgtgg

SEQ ID NO: 213 - RNA, 26 nt, Homo sapiens
  source 1..26: mol_type = unassigned RNA
aatcaactccactttagagcgaaagg

SEQ ID NO: 214 - RNA, 30 nt, Homo sapiens
  source 1..30: mol_type = unassigned RNA
acacaaggaacaattagaggctctccatag

SEQ ID NO: 215 - RNA, 30 nt, Homo sapiens
  source 1..30: mol_type = unassigned RNA
ctgtggggacaaacagaaagacacaaggaa

SEQ ID NO: 216 - RNA, 30 nt, Homo sapiens
  source 1..30: mol_type = unassigned RNA
gaaaggcttttccctggggactgtggggac

SEQ ID NO: 217 - RNA, 30 nt, Homo sapiens
  source 1..30: mol_type = unassigned RNA
aatcaactccactttagagcgaaaggcttt

SEQ ID NO: 218 - DNA, 90 bp, Mus musculus
  source 1..90: mol_type = genomic DNA
gccgccgccgcgccgagcggaggaggaggaggaggcgaggaggagagactgtgagtgggaccgccaaggccgcgggcggggacccttgct

SEQ ID NO: 219 - DNA, 90 bp, Mus musculus
  source 1..90: mol_type = genomic DNA
aaaggtgcagctcaatggggactttcaacttacgattttctttgttttaggctccataaaaatacagactcaccagttcctgctttgatg

SEQ ID NO: 220 - DNA, 66 bp, Mus musculus
  source 1..66: mol_type = genomic DNA
gtagaccagctccaacaggattccatggtagctgggatgttagggctcaggtaagtaaccttcctt

SEQ ID NO: 221 - DNA, 90 bp, Mus musculus
  source 1..90: mol_type = genomic DNA
gcagacagctgtgttctctgtaatacttacatatttgtttaatacttcagggaggaaaagtcagaagaccaggatctccagggcctcaga

SEQ ID NO: 222 - DNA, 90 bp, Mus musculus
  source 1..90: mol_type = genomic DNA
caaaggaagtctggccgatctgctggaaagtatgatgtatatttgatcaagtaagtaagagcaagtcttgtgtctatagaacaagaaggc

SEQ ID NO: 223 - DNA, 90 bp, Mus musculus
  source 1..90: mol_type = genomic DNA
tgtcaaaaagcttctgactattgtttgtgtctctctgtttgtttctacagtccccagggaaaagcttttcgctctaaagtagaattgatt

SEQ ID NO: 224 - DNA, 90 bp, Homo sapiens
  source 1..90: mol_type = genomic DNA
gccgccgccgcgccgagcggaggaggaggaggaggcgaggaggagagactgtgagtgggaccgccgtggccgcgggcggggacccttgcc

SEQ ID NO: 225 - DNA, 90 bp, Homo sapiens
  source 1..90: mol_type = genomic DNA
ggtcgtgcagctcaatgggggctttcaacttacaattttctttgttttaggctccataaaaatacagactcaccagttcctgctttgatg

SEQ ID NO: 226 - DNA, 66 bp, Homo sapiens; identical to SEQ ID NO: 220
  source 1..66: mol_type = genomic DNA

SEQ ID NO: 227 - DNA, 90 bp, Homo sapiens
  source 1..90: mol_type = genomic DNA
gcagactggcatgttctctgtgatacttacatacttgtttaacacttcagggaagaaaagtcagaagaccaggacctccagggcctcaag

SEQ ID NO: 228 - DNA, 90 bp, Homo sapiens
  source 1..90: mol_type = genomic DNA
caaaggaaatctggccgctctgctgggaagtatgatgtgtatttgatcaagtaagtaagagcaactcctatctctacagggcagggaggg

SEQ ID NO: 229 - DNA, 90 bp, Homo sapiens
  source 1..90: mol_type = genomic DNA
ctatggagagcctctaattgttccttgtgtctttctgtttgtccccacagtccccagggaaaagcctttcgctctaaagtggagttgatt

SEQ ID NO: 230 - DNA, 200 bp, Mus musculus
  source 1..200: mol_type = genomic DNA
ctgtggtaaaacccgtccggaaaatggccgccgctgccgccaccgccgccgccgccgccgcgccgagcggaggaggaggaggaggcgaggaggagagactgtgagtgggaccgccaaggccgcgggcggggacccttgctggggggcgggtaggggcgggacgtggcgcgggaggggcccgcggggtcgggcgacacggc

SEQ ID NO: 231 - DNA, 324 bp, Mus musculus
  source 1..324: mol_type = genomic DNA
acatagtatgttgtctgtttatcttcagaatgttccaaaaagccttgggaaaaggtgcagctcaatggggactttcaacttacgattttctttgttttaggctccataaaaatacagactcaccagttcctgctttgatgtgacatgtgactccccagaatacaccttgcttctgtagaccagctccaacaggattccatggtagctgggatgttagggctcaggtaagtaaccttcctttttttttttttagtatatgtcctggtttggccatctgtttttaaaaaaaaaaaaaaggaaaaaaagatatactattcttggaca

SEQ ID NO: 232 - DNA, 200 bp, Mus musculus
  source 1..200: mol_type = genomic DNA
agccaggggtctcatgtgtggcactcaagctcacctatactcactactgtgcagacagctgtgttctctgtaatacttacatatttgtttaatacttcagggaggaaaagtcagaagaccaggatctccagggcctcagagacaagccactgaagtttaagaaggcgaagaaagacaagaaggaggacaaagaaggcaag

SEQ ID NO: 233 - DNA, 200 bp, Mus musculus
  source 1..200: mol_type = genomic DNA
ctatgtatgatgaccccaccttgcctgaaggttggacacgaaagcttaaacaaaggaagtctggccgatctgctggaaagtatgatgtatatttgatcaagtaagtaagagcaagtcttgtgtctatagaacaagaaggccaggtgggtaggaaggctaggatggaaaagctttattgcactgaaatggcttcccaaaaa

SEQ ID NO: 234 - DNA, 200 bp, Mus musculus
  source 1..200: mol_type = genomic DNA
atgtcttagaagaaagcttgtcagcatattttctatctcagtctctatgttgtcaaaaagcttctgactattgtttgtgtctctctgtttgtttctacagtccccagggaaaagcttttcgctctaaagtagaattgattgcatactttgaaaaggtgggagacacctccttggaccctaatgattttgacttcacggta

SEQ ID NO: 235 - DNA, 200 bp, Homo sapiens
  source 1..200: mol_type = genomic DNA
ctctcggagagagggctgtggtaaaagccgtccggaaaatggccgccgccgccgccgccgcgccgagcggaggaggaggaggaggcgaggaggagagactgtgagtgggaccgccgtggccgcgggcggggacccttgccggggggcgggggtcaggggcgggacgtggcgcgggaggggcccgcggggtcggacgacac

SEQ ID NO: 236 - DNA, 324 bp, Homo sapiens
  source 1..324: mol_type = genomic DNA
ctttgtctatgtgtttatcttcaaaatgtcccaaatagccctgggaaaaaggtcgtgcagctcaatgggggctttcaacttacaattttctttgttttaggctccataaaaatacagactcaccagttcctgctttgatgtgacatgtgactccccagaatacaccttgcttctgtagaccagctccaacaggattccatggtagctgggatgttagggctcaggtaagtaaccttcctttttttttttttagtatatgtcctggtttggccatctgttttttttttttttaaaaaaaaaaaaaaaaggaaaagaggaaaaaaa

SEQ ID NO: 237 - DNA, 200 bp, Homo sapiens
  source 1..200: mol_type = genomic DNA
ggggccttgcatgtggtgggggtccaagcctgcctctgctcacttgttctgcagactggcatgttctctgtgatacttacatacttgtttaacacttcagggaagaaaagtcagaagaccaggacctccagggcctcaaggacaaacccctcaagtttaaaaaggtgaagaaagataagaaagaagagaaagagggcaag

SEQ ID NO: 238 - DNA, 200 bp, Homo sapiens
  source 1..200: mol_type = genomic DNA
ccatgtatgatgaccccaccctgcctgaaggctggacacggaagcttaagcaaaggaaatctggccgctctgctgggaagtatgatgtgtatttgatcaagtaagtaagagcaactcctatctctacagggcagggagggcagggacaaggatccctcatggagcaggaaaatgtatgtgcccagggtggggtcgggggg

SEQ ID NO: 239 - DNA, 200 bp, Homo sapiens
  source 1..200: mol_type = genomic DNA
tttgtcagagcgttgtcaccaccatccgctctgccctatctctgacattgctatggagagcctctaattgttccttgtgtctttctgtttgtccccacagtccccagggaaaagcctttcgctctaaagtggagttgattgcgtacttcgaaaaggtaggcgacacatccctggaccctaatgattttgacttcacggta

SEQ ID NO: 240 - DNA, 20 bp, Homo sapiens
  source 1..20: mol_type = other DNA
atgatagggacttagggtga

SEQ ID NO: 241 - DNA, 20 bp, Homo sapiens
  source 1..20: mol_type = other DNA
tttgttccgtgggtggttta

SEQ ID NO: 242 - DNA, 20 bp, Homo sapiens
  source 1..20: mol_type = other DNA
tggggggaggtaggtaggta

SEQ ID NO: 243 - RNA, 11 nt, Homo sapiens
  source 1..11: mol_type = unassigned RNA
aatttgtctag

SEQ ID NO: 244 - RNA, 11 nt, Homo sapiens
  source 1..11: mol_type = unassigned RNA
aatttttggag

SEQ ID NO: 245 - DNA, 4336 bp, synthetic construct
  source 1..4336: mol_type = other DNA
ggcctccgcgccgggttttggcgcctcccgcgggcgcccccctcctcacggcgagcgctgccacgtcagacgaagggcgcagcgagcgtcctgatccttccgcccggacgctcaggacagcggcccgctgctcataagactcggccttagaaccccagtatcagcagaaggacattttaggacgggacttgggtgactctagggcactggttttctttccagagagcggaacaggcgaggaaaagtagtcccttctcggcgattctgcggagggatctccgtggggcggtgaacgccgatgattatataaggacgcgccgggtgtggcacagctagttccgtcgcagccgggatttgggtcgcggttcttgtttgtggatcgctgtgatcgtcacttggtcggtaagtttagtctttttgtcttttatttcaggtcccggatccggtggtggtgcaaatcaaagaactgctcctcagtggatgttgcctttacttctaggcgcgcgcgctccctcctctcggagagagggctgtggtaaaagccgtccggaaaatgtacccatacgatgttccagattacgctcctaggggaggcggaggcatggccgccgctgccgccaccgccgccgccgccgccgcgccgagcggaggaggaggaggaggcgaggaggagagactggaggaaaagtcagaagaccaggatctccagggcctcagagacaagccactgaagtttaagaaggcgaagaaagacaagaaggaggacaaagaaggcaagcatgagccactacaaccttcagcccaccattctgcagagccagcagaggcaggcaaagcagaaacatcagaaagctcaggctctgccccagcagtgccagaagcctcggcttcccccaaacagcggcgctccattatccgtgaccggggacctatgtatgatgaccccaccttgcctgaaggttggacacgaaagcttaaacaaaggaagtctggccgatctgctggaaagtatgatgtatatttgatcaatccccagggaaaagcttttcgctctaaagtagaattgattgcatactttgaaaaggtgggagacacctccttggaccctaatgattttgacttcacggtaactgggagagggagcccctccaggagagagcagaaaccacctaagaagcccaaatctcccaaagctccaggaactggcaggggtcggggacgccccaaagggagcggcactgggagaccaaaggcagcagcatcagaaggtgttcaggtgaaaagggtcctggagaagagccctgggaaacttgttgtcaagatgcctttccaagcatcgcctgggggtaagggtgagggaggtggggctaccacatctgcccaggtcatggtgatcaaacgccctggcagaaagcgaaaagctgaagctgacccccaggccattcctaagaaacggggtagaaagcctgggagtgtggtggcagctgctgcagctgaggccaaaaagaaagccgtgaaggagtcttccatacggtctgtgcatgagactgtgctccccatcaagaagcgcaagacccgggagacggtcagcatcgaggtcaaggaagtggtgaagcccctgctggtgtccacccttggtgagaaaagcgggaagggactgaagacctgcaagagccctgggcgtaaaagcaaggagagcagccccaaggggcgcagcagcagtgcctcctccccacctaagaaggagcaccatcatcaccaccatcactcagagtccacaaaggcccccatgccactgctcccatccccacccccacctgagcctgagagctctgaggaccccatcagcccccctgagcctcaggacttgagcagcagcatctgcaaagaagagaagatgccccgaggaggctcactggaaagcgatggctgccccaaggagccagctaagactcagcctatggtcgccaccactaccacagttgcagaaaagtacaaacaccgaggggagggagagcgcaaagacattgtttcatcttccatgccaaggccaaacagagaggagcctgtggacagccggacgcccgtgaccgagagagttagctgactttacacggagcggattgcaaagcaaaccaacaagaataaaggcagctgttgtctcttctcggccagaagtagctttgcacttttctaaactagaatccagaaacttgttcttccaaagcagagagcattatgaccaaatatcaccaggactgttactcaatgtgtgccgaaaatgactgaaagcactgatatatttaaaaacaaaaggcaatttattaaggaaatttgtaccatttcagtaaacctgtctgaatgtacctgtatacgtttcaaaaacaccccccccccactgaatccctgtaacctatttattatataaagagtttgccttataaatttacataaaaatgtccgtttgtgtcttttgttgtaaaaatcaagtgattttttcataaggttcttttagcatgctaaagactgtgcatccgactcctacatttatgaaagtaaatgcctattgttagaacaaaaaaggctacagaacaaaaaacaaagcgaaataccatctgctttaggttcagtggtattttcccgctgacagggaggcgggtttttgggtacaggaaacgagtcactatggaggcggtactatgtagatgagaattcaggagcaaactgggaaaagcaactgcttccaaatatttgtgatttttacagtgtagttttggaaaaactcttagcctaccaattcttctaagtgttttaaaatgtgggagccagtacacatgaagttatagagtgttttaatgaggcttaaatatttaccgtaactatgaaatgctacgcatatcatgctgttcaggctccgtggccacgcaactcaatgatagggacttagggtgaagcaagggtccccgcccgcggccttggcggaatttttggagcaggttttctgacttcggtcggaaaacccctcccaatttcactggtctacaatgaaagcaaaacagttctcttccccgctccccggtgtgctagggaaacgcgtatctgtctgagtcgaccaaggacacaatcgagctccgatccgtactgtcgagaaacttgtatccgtaaagactgtgcatccgactcctacatttatgaaagtaaatgcctattgttagaacaaaaaaggctacagaacaaaaaacaaagcgaaataccatctgctttaggttcagtggtattttcccgctgacagggaggcgggtttttgggtacaggaaacgagtcactatggaggcggtactatgtagatgagaattcaggagcaaactgggaaaagcaactgcttccaaatatttgtgatttttacagtgtagttttggaaaaactcttagcctaccaattcttctaagtgttttaaaatgtgggagccagtacacatgaagttatagagtgttttaatgaggcttaaatatttaccgtaactatgaaatgctacgcatatcatgctgttcaggctccgtggccacgcaactcaatgatagggacttagggtgaagcaagggtccccgcccgcggccttggcggaatttttggagcaggttttctgacttcggtcggaaaacccctcccaatttcactggtctacaatgaaagcaaaacagttctcttccccgctccccggtgtgctagggaaacgcgtatctgtgagcgttcccagcacttcagccaaggaagctaccaatttttagtttccgagtgtcacgttaaagactgtgcatccgactcctacatttatgaaagtaaatgcctattgttagaacaaaaaaggctacagaacaaaaaacaaagcgaaataccatctgctttaggttcagtggtattttcccgctgacagggaggcgggtttttgggtacaggaaacgagtcactatggaggcggtactatgtagatgagaattcaggagcaaactgggaaaagcaactgcttccaaatatttgtgatttttacagtgtagttttggaaaaactcttagcctaccaattcttctaagtgttttaaaatgtgggagccagtacacatgaagttatagagtgttttaatgaggcttaaatatttaccgtaactatgaaatgctacgcatatcatgctgttcaggctccgtggccacgcaactcaatgatagggacttagggtgaagcaagggtccccgcccgcggccttggcggaatttttggagcaggttttctgacttcggtcggaaaacccctcccaatttcactggtctacaatgaaagc

SEQ ID NO: 246 - DNA, 4323 bp, synthetic construct
  source 1..4323: mol_type = other DNA
ggcctccgcgccgggttttggcgcctcccgcgggcgcccccctcctcacggcgagcgctgccacgtcagacgaagggcgcagcgagcgtcctgatccttccgcccggacgctcaggacagcggcccgctgctcataagactcggccttagaaccccagtatcagcagaaggacattttaggacgggacttgggtgactctagggcactggttttctttccagagagcggaacaggcgaggaaaagtagtcccttctcggcgattctgcggagggatctccgtggggcggtgaacgccgatgattatataaggacgcgccgggtgtggcacagctagttccgtcgcagccgggatttgggtcgcggttcttgtttgtggatcgctgtgatcgtcacttggtcggtaagtttagtctttttgtcttttatttcaggtcccggatccggtggtggtgcaaatcaaagaactgctcctcagtggatgttgcctttacttctaggcgcgcgcgctccctcctctcggagagagggctgtggtaaaagccgtccggaaaatgatggccgccgccgccgccgccgcgccgagcggaggaggaggaggaggcgaggaggagagactggaagaaaagtcagaagaccaggacctccagggcctcaaggacaaacccctcaagtttaaaaaggtgaagaaagataagaaagaagagaaagagggcaagcatgagcccgtgcagccatcagcccaccactctgctgagcccgcagaggcaggcaaagcagagacatcagaagggtcaggctccgccccggctgtgccggaagcttctgcctcccccaaacagcggcgctccatcatccgtgaccggggacccatgtatgatgaccccaccctgcctgaaggctggacacggaagcttaagcaaaggaaatctggccgctctgctgggaagtatgatgtgtatttgatcaatccccagggaaaagcctttcgctctaaagtggagttgattgcgtacttcgaaaaggtaggcgacacatccctggaccctaatgattttgacttcacggtaactgggagagggagcccctcccggcgagagcagaaaccacctaagaagcccaaatctcccaaagctccaggaactggcagaggccggggacgccccaaagggagcggcaccacgagacccaaggcggccacgtcagagggtgtgcaggtgaaaagggtcctggagaaaagtcctgggaagctccttgtcaagatgccttttcaaacttcgccagggggcaaggctgaggggggtggggccaccacatccacccaggtcatggtgatcaaacgccccggcaggaagcgaaaagctgaggccgaccctcaggccattcccaagaaacggggccgaaagccggggagtgtggtggcagccgctgccgccgaggccaaaaagaaagccgtgaaggagtcttctatccgatctgtgcaggagaccgtactccccatcaagaagcgcaagacccgggagacggtcagcatcgaggtcaaggaagtggtgaagcccctgctggtgtccaccctcggtgagaagagcgggaaaggactgaagacctgtaagagccctgggcggaaaagcaaggagagcagccccaaggggcgcagcagcagcgcctcctcaccccccaagaaggagcaccaccaccatcaccaccactcagagtccccaaaggcccccgtgccactgctcccacccctgcccccacctccacctgagcccgagagctccgaggaccccaccagcccccctgagccccaggacttgagcagcagcgtctgcaaagaggagaagatgcccagaggaggctcactggagagcgacggctgccccaaggagccagctaagactcagcccgcggttgccaccgccgccacggccgcagaaaagtacaaacaccgaggggagggagagcgcaaagacattgtttcatcctccatgccaaggccaaacagagaggagcctgtggacagccggacgcccgtgaccgagagagttagctgactttacacggagcggattgcaaagcaaaccaacaagaataaaggcagctgttgtctcttctcggccagaagtagctttgcacttttctaaactagaatccagaaacttgttcttccaaagcagagagcattatgaccaaatatcaccaggactgttactcaatgtgtgccgaaaatgactgaaagcactgatatatttaaaaacaaaaggcaatttattaaggaaatttgtaccatttcagtaaacctgtctgaatgtacctgtatacgtttcaaaaacaccccccccccactgaatccctgtaacctatttattatataaagagtttgccttataaatttacataaaaatgtccgtttgtgtcttttgttgtaaaaatcaagtgattttttcataaggttcttttagcatgctggggagcacgcacgcgggatatccttaaagactgtgcatccgactcctacatttatgaaagtaaatgcctattgttagaacaaaaaaggctacagaacaaaaaacaaagcgaaataccatctgctttaggttcagtggtattttcccgctgacagggaggcgggtttttgggtacaggaaacgagtcactatggaggcggtactatgtagatgagaattcaggagcaaactgggaaaagcaactgcttccaaatatttgtgatttttacagtgtagttttggaaaaactcttagcctaccaattcttctaagtgttttaaaatgtgggagccagtacacatgaagttatagagtgttttaatgaggcttaaatatttaccgtaactatgaaatgctacgcatatcatgctgttcaggctccgtggccacgcaactcaatgatagggacttagggtgaaaacaagtatgtaagtatcacagagaacataatttttggagcaggttttctgacttcggtcggaaaacccctactttctggagtttcaaaagtagactgtacgctaagggtcatatctttttttgttttggtttgttctgagtcgaccaaggacacaatcgagctccgatccgtactgtcgagaaacttgtatccgtaaagactgtgcatccgactcctacatttatgaaagtaaatgcctattgttagaacaaaaaaggctacagaacaaaaaacaaagcgaaataccatctgctttaggttcagtggtattttcccgctgacagggaggcgggtttttgggtacaggaaacgagtcactatggaggcggtactatgtagatgagaattcaggagcaaactgggaaaagcaactgcttccaaatatttgtgatttttacagtgtagttttggaaaaactcttagcctaccaattcttctaagtgttttaaaatgtgggagccagtacacatgaagttatagagtgttttaatgaggcttaaatatttaccgtaactatgaaatgctacgcatatcatgctgttcaggctccgtggccacgcaactcaatgatagggacttagggtgaaaacaagtatgtaagtatcacagagaacataatttttggagcaggttttctgacttcggtcggaaaacccctactttctggagtttcaaaagtagactgtacgctaagggtcatatctttttttgttttggtttgttgagcgttcccagcacttcagccaaggaagctaccaatttttagtttccgagtgtcacgttaaagactgtgcatccgactcctacatttatgaaagtaaatgcctattgttagaacaaaaaaggctacagaacaaaaaacaaagcgaaataccatctgctttaggttcagtggtattttcccgctgacagggaggcgggtttttgggtacaggaaacgagtcactatggaggcggtactatgtagatgagaattcaggagcaaactgggaaaagcaactgcttccaaatatttgtgatttttacagtgtagttttggaaaaactcttagcctaccaattcttctaagtgttttaaaatgtgggagccagtacacatgaagttatagagtgttttaatgaggcttaaatatttaccgtaactatgaaatgctacgcatatcatgctgttcaggctccgtggccacgcaactcaatgatagggacttagggtgaaaacaagtatgtaagtatcacagagaacataatttttggagcaggttttctgacttcggtcggaaaacccctactttctggagtttcaaaagtagactgtacgctaagggtcatatctttttttgttttggtttgtacatgga

SEQ ID NO: 247 - DNA, 4302 bp, synthetic construct
  source 1..4302: mol_type = other DNA
ggcctccgcgccgggttttggcgcctcccgcgggcgcccccctcctcacggcgagcgctgccacgtcagacgaagggcgcagcgagcgtcctgatccttccgcccggacgctcaggacagcggcccgctgctcataagactcggccttagaaccccagtatcagcagaaggacattttaggacgggacttgggtgactctagggcactggttttctttccagagagcggaacaggcgaggaaaagtagtcccttctcggcgattctgcggagggatctccgtggggcggtgaacgccgatgattatataaggacgcgccgggtgtggcacagctagttccgtcgcagccgggatttgggtcgcggttcttgtttgtggatcgctgtgatcgtcacttggtcggtaagtttagtctttttgtcttttatttcaggtcccggatccggtggtggtgcaaatcaaagaactgctcctcagtggatgttgcctttacttctaggcgcgcgcgctccctcctctcggagagagggctgtggtaaaagccgtccggaaaatggccgccgccgccgccgccgcgccgagcggaggaggaggaggaggcgaggaggagagactggaagaaaagtcagaagaccaggacctccagggcctcaaggacaaacccctcaagtttaaaaaggtgaagaaagataagaaagaagagaaagagggcaagcatgagcccgtgcagccatcagcccaccactctgctgagcccgcagaggcaggcaaagcagagacatcagaagggtcaggctccgccccggctgtgccggaagcttctgcctcccccaaacagcggcgctccatcatccgtgaccggggacccatgtatgatgaccccaccctgcctgaaggctggacacggaagcttaagcaaaggaaatctggccgctctgctgggaagtatgatgtgtatttgatcaatccccagggaaaagcctttcgctctaaagtggagttgattgcgtacttcgaaaaggtaggcgacacatccctggaccctaatgattttgacttcacggtaactgggagagggagcccctcccggcgagagcagaaaccacctaagaagcccaaatctcccaaagctccaggaactggcagaggccggggacgccccaaagggagcggcaccacgagacccaaggcggccacgtcagagggtgtgcaggtgaaaagggtcctggagaaaagtcctgggaagctccttgtcaagatgccttttcaaacttcgccagggggcaaggctgaggggggtggggccaccacatccacccaggtcatggtgatcaaacgccccggcaggaagcgaaaagctgaggccgaccctcaggccattcccaagaaacggggccgaaagccggggagtgtggtggcagccgctgccgccgaggccaaaaagaaagccgtgaaggagtcttctatccgatctgtgcaggagaccgtactccccatcaagaagcgcaagacccgggagacggtcagcatcgaggtcaaggaagtggtgaagcccctgctggtgtccaccctcggtgagaagagcgggaaaggactgaagacctgtaagagccctgggcggaaaagcaaggagagcagccccaaggggcgcagcagcagcgcctcctcaccccccaagaaggagcaccaccaccatcaccaccactcagagtccccaaaggcccccgtgccactgctcccacccctgcccccacctccacctgagcccgagagctccgaggaccccaccagcccccctgagccccaggacttgagcagcagcgtctgcaaagaggagaagatgcccagaggaggctcactggagagcgacggctgccccaaggagccagctaagactcagcccgcggttgccaccgccgccacggccgcagaaaagtacaaacaccgaggggagggagagcgcaaagacattgtttcatcctccatgccaaggccaaacagagaggagcctgtggacagccggacgcccgtgaccgagagagttagctgactttacacggagcggattgcaaagcaaaccaacaagaataaaggcagctgttgtctcttctcggccagaagtagctttgcacttttctaaactagaatccagaaacttgttcttccaaagcagagagcattatgaccaaatatcaccaggactgttactcaatgtgtgccgaaaatgactgaaagcactgatatatttaaaaacaaaaggcaatttattaaggaaatttgtaccatttcagtaaacctgtctgaatgtacctgtatacgtttcaaaaacaccccccccccactgaatccctgtaacctatttattatataaagagtttgccttataaatttacataaaaatgtccgtttgtgtcttttgttgtaaaaatcaagtgattttttcataaggttcttttagcatgctggggagcacgcacgcgggatatccttaaagactgtgcatccgactcctacatttatgaaagtaaatgcctattgttagaacaaaaaaggctacagaacaaaaaacaaagcgaaataccatctgctttaggttcagtggtattttcccgctgacagggaggcgggtttttgggtacaggaaacgagtcactatggaggcggtactatgtagatgagaattcaggagcaaactgggaaaagcaactgcttccaaatatttgtgatttttacagtgtagttttggaaaaactcttagcctaccaattcttctaagtgttttaaaatgtgggagccagtacacatgaagttatagagtgttttaatgaggcttaaatatttaccgtaactatgaaatgctacgcatatcatgctgttcaggctccgtggccacgcaactcatggggggaggtaggtaggtatttcttccctgaagtgttaaacaaaatttttggagcaggttttctgacttcggtcggaaaacccctactttctggagtttcaaaagtagactgtacgctaagggtcatatctttttttgttttggtttgttctgagtcgaccaaggacacaatcgagctccgatccgtactgtcgagaaacttgtatccgtaaagactgtgcatccgactcctacatttatgaaagtaaatgcctattgttagaacaaaaaaggctacagaacaaaaaacaaagcgaaataccatctgctttaggttcagtggtattttcccgctgacagggaggcgggtttttgggtacaggaaacgagtcactatggaggcggtactatgtagatgagaattcaggagcaaactgggaaaagcaactgcttccaaatatttgtgatttttacagtgtagttttggaaaaactcttagcctaccaattcttctaagtgttttaaaatgtgggagccagtacacatgaagttatagagtgttttaatgaggcttaaatatttaccgtaactatgaaatgctacgcatatcatgctgttcaggctccgtggccacgcaactcatggggggaggtaggtaggtatttcttccctgaagtgttaaacaaaatttttggagcaggttttctgacttcggtcggaaaacccctactttctggagtttcaaaagtagactgtacgctaagggtcatatctttttttgttttggtttgttgagcgttcccagcacttcagccaaggaagctaccaatttttagtttccgagtgtcacgttaaagactgtgcatccgactcctacatttatgaaagtaaatgcctattgttagaacaaaaaaggctacagaacaaaaaacaaagcgaaataccatctgctttaggttcagtggtattttcccgctgacagggaggcgggtttttgggtacaggaaacgagtcactatggaggcggtactatgtagatgagaattcaggagcaaactgggaaaagcaactgcttccaaatatttgtgatttttacagtgtagttttggaaaaactcttagcctaccaattcttctaagtgttttaaaatgtgggagccagtacacatgaagttatagagtgttttaatgaggcttaaatatttaccgtaactatgaaatgctacgcatatcatgctgttcaggctccgtggccacgcaactcatggggggaggtaggtaggtatttcttccctgaagtgttaaacaaaatttttggagcaggttttctgacttcggtcggaaaacccctactttctggagtttcaaaagtagactgtacgctaagggtcatatctttttttgttttggtttgtacatgga

SEQ ID NO: 248 - DNA, 1497 bp, Homo sapiens; identical to SEQ ID NO: 7
  source 1..1497: mol_type = genomic DNA

SEQ ID NO: 249 - DNA, 64 bp, Homo sapiens
  source 1..64: mol_type = genomic DNA
actttctggagtttcaaaagtagactgtacgctaagggtcatatctttttttgttttggtttgt

SEQ ID NO: 250 - RNA, 20 nt, Homo sapiens
  source 1..20: mol_type = unassigned RNA
gcaccccatcccccactaca

SEQ ID NO: 251 - RNA, 30 nt, Homo sapiens
  source 1..30: mol_type = unassigned RNA
gggatcgaatcagagtcatgcggaggtgta

SEQ ID NO: 252 - RNA, 30 nt, Homo sapiens
  source 1..30: mol_type = unassigned RNA
gacagtgctctaggattattctggtagtta

SEQ ID NO: 253 - RNA, 24 nt, Homo sapiens
  source 1..24: mol_type = unassigned RNA
cggcggtcccactcacagtctctc

SEQ ID NO: 254 - RNA, 24 nt, Homo sapiens
  source 1..24: mol_type = unassigned RNA
ccgcccgcggccacggcggtccca

SEQ ID NO: 255 - RNA, 24 nt, Homo sapiens
  source 1..24: mol_type = unassigned RNA
ccggcaagggtccccgcccgcggc

SEQ ID NO: 256 - RNA, 30 nt, Homo sapiens
  source 1..30: mol_type = unassigned RNA
cggccacggcggtcccactcacagtctctc

SEQ ID NO: 257 - RNA, 30 nt, Homo sapiens
  source 1..30: mol_type = unassigned RNA
tccccgcccgcggccacggcggtcccactc

SEQ ID NO: 258 - RNA, 30 nt, Homo sapiens
  source 1..30: mol_type = unassigned RNA
ccggcaagggtccccgcccgcggccacggc

SEQ ID NO: 259 - RNA, 24 nt, Homo sapiens
  source 1..24: mol_type = unassigned RNA
cggcggtcccactcacagtctctc

SEQ ID NO: 260 - RNA, 24 nt, Homo sapiens
  source 1..24: mol_type = unassigned RNA
ccgcccgcggccacggcggtccca

SEQ ID NO: 261 - RNA, 24 nt, Homo sapiens
  source 1..24: mol_type = unassigned RNA
ccggcaagggtccccgcccgcggc

SEQ ID NO: 262 - RNA, 30 nt, Homo sapiens; identical to SEQ ID NO: 256
  source 1..30: mol_type = unassigned RNA

SEQ ID NO: 263 - RNA, 30 nt, Homo sapiens; identical to SEQ ID NO: 257
  source 1..30: mol_type = unassigned RNA

SEQ ID NO: 264 - RNA, 30 nt, Homo sapiens; identical to SEQ ID NO: 258
  source 1..30: mol_type = unassigned RNA

SEQ ID NO: 265 - RNA, 24 nt, Homo sapiens
  source 1..24: mol_type = unassigned RNA
aagtgagcagaggcaggcttggac

SEQ ID NO: 266 - RNA, 24 nt, Homo sapiens
  source 1..24: mol_type = unassigned RNA
gaacatgccagtctgcagaacaag

SEQ ID NO: 267 - RNA, 24 nt, Homo sapiens
  source 1..24: mol_type = unassigned RNA
caagtatgtaagtatcacagagaa

SEQ ID NO: 268 - RNA, 24 nt, Homo sapiens
  source 1..24: mol_type = unassigned RNA
tttcttccctgaagtgttaaacaa

SEQ ID NO: 269 - RNA, 30 nt, Homo sapiens
  source 1..30: mol_type = unassigned RNA
agaacaagtgagcagaggcaggcttggacc

SEQ ID NO: 270 - RNA, 30 nt, Homo sapiens
  source 1..30: mol_type = unassigned RNA
cagagaacatgccagtctgcagaacaagtg

SEQ ID NO: 271 - RNA, 30 nt, Homo sapiens
  source 1..30: mol_type = unassigned RNA
aaacaagtatgtaagtatcacagagaacat

SEQ ID NO: 272 - RNA, 30 nt, Homo sapiens
  source 1..30: mol_type = unassigned RNA
cttttcttccctgaagtgttaaacaagtat

SEQ ID NO: 273 - RNA, 24 nt, Homo sapiens
  source 1..24: mol_type = unassigned RNA
aagtgagcagaggcaggcttggac

SEQ ID NO: 274 - RNA, 24 nt, Homo sapiens
  source 1..24: mol_type = unassigned RNA
gaacatgccagtctgcagaacaag

SEQ ID NO: 275 - RNA, 24 nt, Homo sapiens
  source 1..24: mol_type = unassigned RNA
caagtatgtaagtatcacagagaa

SEQ ID NO: 276 - RNA, 24 nt, Homo sapiens
  source 1..24: mol_type = unassigned RNA
tttcttccctgaagtgttaaacaa

SEQ ID NO: 277 - RNA, 30 nt, Homo sapiens; identical to SEQ ID NO: 269
  source 1..30: mol_type = unassigned RNA

SEQ ID NO: 278 - RNA, 30 nt, Homo sapiens; identical to SEQ ID NO: 270
  source 1..30: mol_type = unassigned RNA

SEQ ID NO: 279 - RNA, 30 nt, Homo sapiens; identical to SEQ ID NO: 271
  source 1..30: mol_type = unassigned RNA

SEQ ID NO: 280 - RNA, 30 nt, Homo sapiens; identical to SEQ ID NO: 272
  source 1..30: mol_type = unassigned RNA

SEQ ID NO: 281 - RNA, 20 nt, Homo sapiens
  source 1..20: mol_type = unassigned RNA
gcaccccatcccccactaca

SEQ ID NO: 282 - RNA, 30 nt, Homo sapiens; identical to SEQ ID NO: 251
  source 1..30: mol_type = unassigned RNA

SEQ ID NO: 283 - RNA, 30 nt, Homo sapiens; identical to SEQ ID NO: 252
  source 1..30: mol_type = unassigned RNA

SEQ ID NO: 284 - RNA, 24 nt, Homo sapiens
  source 1..24: mol_type = unassigned RNA
agttgctcttacttacttgatcaa

SEQ ID NO: 285 - RNA, 24 nt, Homo sapiens
  source 1..24: mol_type = unassigned RNA
tccctgccctgtagagataggagt

SEQ ID NO: 286 - RNA, 24 nt, Homo sapiens
  source 1..24: mol_type = unassigned RNA
gagggatccttgtccctgccctcc

SEQ ID NO: 287 - RNA, 24 nt, Homo sapiens
  source 1..24: mol_type = unassigned RNA
acatacattttcctgctccatgag

SEQ ID NO: 288 - RNA, 30 nt, Homo sapiens; identical to SEQ ID NO: 200
  source 1..30: mol_type = unassigned RNA

SEQ ID NO: 289 - RNA, 30 nt, Homo sapiens; identical to SEQ ID NO: 201
  source 1..30: mol_type = unassigned RNA

SEQ ID NO: 290 - RNA, 30 nt, Homo sapiens
  source 1..30: mol_type = unassigned RNA
atgagggatccttgtccctgccctccctgc

SEQ ID NO: 291 - RNA, 30 nt, Homo sapiens
  source 1..30: mol_type = unassigned RNA
cacatacattttcctgctccatgagggatc

SEQ ID NO: 292 - RNA, 24 nt, Homo sapiens
  source 1..24: mol_type = unassigned RNA
tggtggtgacaacgctctgacaaa

SEQ ID NO: 293 - RNA, 24 nt, Homo sapiens
  source 1..24: mol_type = unassigned RNA
tcagagatagggcagagcggatgg

SEQ ID NO: 294 - RNA, 24 nt, Homo sapiens
  source 1..24: mol_type = unassigned RNA
tagaggctctccatagcaatgtca

SEQ ID NO: 295 - RNA, 24 nt, Homo sapiens
  source 1..24: mol_type = unassigned RNA
cagaaagacacaaggaacaattag

SEQ ID NO: 296 - RNA, 24 nt, Homo sapiens
  source 1..24: mol_type = unassigned RNA
cctggggactgtggggacaaacag

SEQ ID NO: 297 - RNA, 30 nt, Homo sapiens
  source 1..30: mol_type = unassigned RNA
caatgtcagagatagggcagagcggatggt

SEQ ID NO: 298 - RNA, 30 nt, Homo sapiens
  source 1..30: mol_type = unassigned RNA
caattagaggctctccatagcaatgtcaga

SEQ ID NO: 299 - RNA, 30 nt, Homo sapiens
  source 1..30: mol_type = unassigned RNA
aaacagaaagacacaaggaacaattagagg

SEQ ID NO: 300 - RNA, 30 nt, Homo sapiens
  source 1..30: mol_type = unassigned RNA
tccctggggactgtggggacaaacagaaag

SEQ ID NO: 301 - RNA, 24 nt, Homo sapiens
  source 1..24: mol_type = unassigned RNA
agttgctcttacttacttgatcaa

SEQ ID NO: 302 - RNA, 24 nt, Homo sapiens
  source 1..24: mol_type = unassigned RNA
tccctgccctgtagagataggagt

SEQ ID NO: 303 - RNA, 24 nt, Homo sapiens
  source 1..24: mol_type = unassigned RNA
gagggatccttgtccctgccctcc

SEQ ID NO: 304 - RNA, 24 nt, Homo sapiens
  source 1..24: mol_type = unassigned RNA
acatacattttcctgctccatgag

SEQ ID NO: 305 - RNA, 30 nt, Homo sapiens; identical to SEQ ID NO: 200
  source 1..30: mol_type = unassigned RNA

SEQ ID NO: 306 - RNA, 30 nt, Homo sapiens; identical to SEQ ID NO: 201
  source 1..30: mol_type = unassigned RNA

SEQ ID NO: 307 - RNA, 30 nt, Homo sapiens; identical to SEQ ID NO: 290
  source 1..30: mol_type = unassigned RNA

SEQ ID NO: 308 - RNA, 30 nt, Homo sapiens; identical to SEQ ID NO: 291
  source 1..30: mol_type = unassigned RNA

SEQ ID NO: 309 - RNA, 24 nt, Homo sapiens
  source 1..24: mol_type = unassigned RNA
tggtggtgacaacgctctgacaaa

SEQ ID NO: 310 - RNA, 24 nt, Homo sapiens
  source 1..24: mol_type = unassigned RNA
tcagagatagggcagagcggatgg

SEQ ID NO: 311 - RNA, 24 nt, Homo sapiens
  source 1..24: mol_type = unassigned RNA
tagaggctctccatagcaatgtca

SEQ ID NO: 312 - RNA, 24 nt, Homo sapiens
  source 1..24: mol_type = unassigned RNA
cagaaagacacaaggaacaattag

SEQ ID NO: 313 - RNA, 24 nt, Homo sapiens
  source 1..24: mol_type = unassigned RNA
cctggggactgtggggacaaacag

SEQ ID NO: 314 - RNA, 30 nt, Homo sapiens; identical to SEQ ID NO: 297
  source 1..30: mol_type = unassigned RNA

SEQ ID NO: 315 - RNA, 30 nt, Homo sapiens; identical to SEQ ID NO: 298
  source 1..30: mol_type = unassigned RNA

SEQ ID NO: 316 - RNA, 30 nt, Homo sapiens; identical to SEQ ID NO: 299
  source 1..30: mol_type = unassigned RNA

SEQ ID NO: 317 - RNA, 30 nt, Homo sapiens; identical to SEQ ID NO: 300
  source 1..30: mol_type = unassigned RNA

SEQ ID NO: 318 - DNA, 500 bp, Homo sapiens
  source 1..500: mol_type = genomic DNA
tttcttttgtaatccgaaacattctagtctgcgaattaaaagccattatttgaagaaggatgccccggctccatctggccaccgaaagattgctccttaacacaggctaaggaccagcttctttgggagagaacagacgcaggggcgggagggaaaaagggagaggcagacgtcacttcctcttggcgactctggcagcagattggtcggttgagtggcagaaaggcagacggggactgggcaaggcactgtcggtgacatcacggacagggcgacttctatgtagatgaggcagcgcagaggctgctgcttcgccacttgctgcttcgccacgaagggagttcccgtgccctgggagcgggttcaggaccgctgatcggaagtgagaatcccagctgtgtgtcagggctggaaagggctcgggagtgcgcggggcaagtgaccgtgtgtgtaaagagtgaggcgtatgaggctgtgtcggggcagaggcacaacgtttc

SEQ ID NO: 319 - DNA, 500 bp, Homo sapiens
  source 1..500: mol_type = genomic DNA
gtttcttctgtaatccgaaacattctagtctgcgaattaaaagccattatttgaagaaggatgccccggctccatctggccaccgaaaggttgctccttaacacaggctaaggaccagcttttttgggagagaacagacgcaggggcgggagggaaaaagggagaggcagacgtcacttcctcttggcggctctggcagcagattggtcagttgagtggcagaaaagcagacggggactgggcaaggcactgtcggtgacatcacggacagggcgacttctatgtagatgaggcagcgcagaggctgctgcttcgccacttgctgcttcgccacgaaggagttcccctgccctgggagcgggttcaggaccgcggatcggaagagagaatcccagctgtgtgtcagggctggaaagggctcgggagtgcgcggggcaagtgaccgtgtgtgtaaagagtgaggcgtatgaggctgtgtcggggcagagcccgaagatctc

SEQ ID NO: 320 - DNA, 500 bp, Homo sapiens
  source 1..500: mol_type = genomic DNA
gtttcttttgtaatccgaaacattctagtctgcgaattaaaagccattatttgaagaaggatgccccggctccatctggccaccgaaaggttgctccttaacacaggctaaggaccagcttctttgggagagaacagacgcaggggcgggagggaaaaagggagaggcagacgtcacttccccttggcggctctggcagcagattggtcggttgagtggcagaaaggcagacggggactgggcaaggcactgtcggtgacatcacggacagggcgacttctatgtagatgaggcagcgcagaggctgctgcttcgccacttgctgcttcgccacgaaggagttcccgtgccctgggagcgggttcaggaccgcggatcggaagtgagaatcccagctgtgtgtcagggctggaaagggctcgggagtgcgcggggcaagtgaccgtgtgtgtaaagagtgaggcgtatgaggctgtgtcggggcagagcccgaagatctc

SEQ ID NO: 321 - DNA, 500 bp, Homo sapiens
  source 1..500: mol_type = genomic DNA
tctccccgcccgcgggcggcgaagtaaaggcccagcgcagcccgcgctcctgccctggagcctcgtctttctccaggaaaacgtggaccgctctccgccgacaggtctcttccacagacccctgtcgccttcgcccccggtctcttccggttctgtcttttcgctggctcgatacgaacaaggaagtcgcccccagcggagccccggctcccccaggcagaggcggccccgggggcggagtcaacggcggaggccacgccctctgtgaaagggcggggcatgcaaattcgaaatgaaagcccgggaacgccggaagaagcacgggtgtaagatttcccttttcaaaggcagagaataagaaatcagcccgagagtgtaagggcgtcaatagcgctgtggacgagacagagggaatggggcaaggagcgaggctggggctctcaccgcgacttgaatgtggatgagagtgggacggtgacggcgggcgcgaaggcgagcgc

SEQ ID NO: 322 - DNA, 500 bp, Homo sapiens
  source 1..500: mol_type = genomic DNA
ccaacaagagagaccctcatctctacaaaatattttttaaaataactgggcctcatggtgcattcctgtaatctgagctagttgggaggatagctagagcccaggagatcgaggctgcagagaaccgtgatcacacgactgcactccagcctgggtgacagagcaagaccctgtctcaatagatagatagatagatagatagatagatagatagatagatagatagataaaaacagagaggtgaaaaatatggttttaagggttctgtttaagaatactctgttccaacatggagtttgtcaactctaaagtggtaaaaaacaagacagattgtagacattttcataaaaggcaggattatttggtgtcaccaaattaaatatgttaatggtcacagcggaggccgactcaatcagccttttattctgccaggctatttgatactgctgagggcttacctatttcctgaggagaaaaatagtcattaaaatgaccttata

SEQ ID NO: 323 - DNA, 500 bp, Homo sapiens
  source 1..500: mol_type = genomic DNA
gggcatgaaagataaagttctggaggtaagtagtgatgatggttacacaacaatgtgaacatattctatgccagtgaatttacacttaaggttaaaatggtaaattttatgtatactttggcataatttaaaaaaaagtttgaaaaagaaaaaagacaaaacaataatcgtctttggagaagtctgttacactgaatctggagccaagtgaacagaaccctgattttgatcccttttctctcaaaagcccttcgcagtctctgaattaagtctattagcatgttcctcccatagtgctttgcttcatatcaacaaaaacctagctaagtgaaatcagcaacgatatgcagaaaccacctacgcaggtcacaaacatctttctatgattgtataattttcaagcaagcaataagtgaagatttttccataggccctaaactcacctttgcgaaataggaagctggtttattgggagtgatgagcagggggcgtaacaaatt

SEQ ID NO: 324 - DNA, 494 bp, Homo sapiens
  source 1..494: mol_type = genomic DNA
gagacagggcttaaaagtcctgggcaattagctgggcacagtgtcgtgcgcctgtaatcccacctagttgggaggctgaggcagaagaatctcttgaacccgaggtagaggttgcagtgagccgagatcgcgccactgcactccagcctggatgacagagtgagaccctgtctcaaaaaaaaaaaaagtcctgggcagcaaggcctccacttcaccccctaaaggttgccccaagagcaccgtgtgactgctaaggtatttccggagtctaaagacgattattcaggtctcatttgcatacccataatacactgcaaacagtatttttttcggaaaaacatttatatattgcttgacatttttaagtatgagaattttgcatgcagaatttttttgtataaactttctcaggtagtaacccttgggattagtagacaccatcagtgtactaggaattgcagttacccgaaaattgagttacagaagtaactggt

SEQ ID NO: 325 - DNA, 500 bp, Homo sapiens
  source 1..500: mol_type = genomic DNA
cgactcgcaaccttttcggggtcccgagtccaacacccgtgggaatcccatgggcaccatggcccctcgctccaaaaatgctttcgcgtcgcgcagacactgctcggtagtttcggggatcagcgtttgagtaagagcccgcgtctgaaccctccgcgccgccccggccccagtggaaagacgcgcaggcaaaacgcaccacgtgacggagcgtgaccgcgcgccgagcgcgcgccaaggtcgggcaggaagagggcctatttcccatgattccttcatatttgcatatacgatacaaggctgttagagagataattagaattaatttgactgtaaacacaaagatattagtacaaaatacgtgacgtagaaagtaataatttcttgggtagtttgcagttttaaaattatgttttaaaatggactatcatatgcttaccgtaacttgaaagtatttcgatttcttggctttatatatcttgtggaaaggacgaaacacc

SEQ ID NO: 326 - DNA, 500 bp, Homo sapiens
  source 1..500: mol_type = genomic DNA
caaagccggttatgaagcgggggtggggtgggctagttttaataggtccaggcgattagtacctggcatccttaaccacctacagtttgagaagggagtgggtgataaaagcctggaagggaagggaaatcgggccgggcattaggctccatcgctcatcaatagacaaggcctttaggaaactgcgacaacggcttttgctctgggcctttactgccgaatccaggtctccgggcttaacaacaacgaaggggctgtgactggctgctttctcaaccaatcagcaccgaactcatttgcatgggctgagaacaaatgttcgcgaactctagaaatgaatgacttaagtaagttccttagaatattatttttcctactgaaagttaccacatgcgtcgttgtttatacagtaataggaacaagaaaaaagtcacctaagctcaccctcatcaattgtggagttcctttatatcccatcttctctccaaacacatacgcag

SEQ ID NO: 327 - DNA, 500 bp, Homo sapiens
  source 1..500: mol_type = genomic DNA
cacgcctgcctgggctgctccaaggtggtggctaggggtggcacaagttacacattttcaatttggataggttgtgattcttgtcttccccagtcagatacctacagccgctgagagccggtattccaacgccatgagacgccttctgtcgtgagcagttgacaagaaagacccagcacttactgcaaccggaaggagcggttcctccctcgctcgcgcagccgctcttccccgccactccctcggtgcccgccagcacattcccagcaagccctgagtatatttgcatatcaactcactacatttttttcttctaactaaaaaatcgaaaggacaaattccagattctccttgtgaagtcttcctttcagttcagaagaaatggaattcgctcttcaacttcaggaagttgaaataaagagttgcttggattttgtgttcacctttaccaaaaaatggatttggtaacactgccaccctgctttggtgacagagaaagc

SEQ ID NO: 328 - DNA, 500 bp, Homo sapiens
  source 1..500: mol_type = genomic DNA
tcgagctccactaggccgaggaccctaaaccccgaagaaaggaaaggcctctcaccgtcctttcgccgccgccccgcgcttcctgatgagttcgtccagggagatgtccgccatcttgctccgccgagcaagccgaaagcagtcgagaccccgcgagcccgccccttcggccgctagggagcgacgaactacttccggcgtccgcggaccaactctcgcgacagccagctcaaagcaggcaagaaccggaaggggcggggacgttccccgtgagccttcgcggtgctggctgctcatctgcatacggaagttcggcacattatgaattatttattttcctcgagggaaaaaattaaatgaaaagcaacaaaatacattattaacaagtgagacaaacttcaatggaactggatcatgacctcaacagtcaactacgatagtcatcatacgcctaatgagaatagaattcattacctaggaaataaactaaaaacgtcctt

SEQ ID NO: 329 - DNA, 500 bp, Homo sapiens
  source 1..500: mol_type = genomic DNA
gacaagagaaggactgaactgggggagtgagggaagaatgcgagagtgagactcagagagtaaaggggagggaaaaaaaagaagagagaaagggcgaggaagggggcgaccgcaggagggagacagacctggagtccactcggaggcctggagccgcacaaagcgccaggtcagcggtcccggctgggtgagaccagcaggcggctctagcgcgcgggagctgggcgaggctccgggacgacctcaccaatggagactgcagtatttagcatgccccacccatctgcaaggcattctggatagtgtcaaaacagccggaaatcaagtccgtttatctcaaactttagcattttgggaataaatgatatttgctatgctggttaaattagattttagttaaatttcctgctgaagctctagtacgataagcaacttgacctaagtgtaaagttgagacttccttcaggtttatatagcttgtgcgccgcttgggtacctcg

SEQ ID NO: 330 - DNA, 500 bp, Mus musculus
  source 1..500: mol_type = genomic DNA
cacaagtaatgtacttttaaaattaacctttctataccggttttcacagtgcggctgtttttgttgttcctcttagtgttaattcacactaaagactgtgcatccgactcctacatttatgaaagtaaatgcctattgttagaacaaaaaaggctacagaacaaaaaacaaagcgaaataccatctgctttaggttcagtggtattttcccgctgacagggaggcgggtttttgggtacaggaaacgagtcactatggaggcggtactatgtagatgagaattcaggagcaaactgggaaaagcaactgcttccaaatatttgtgatttttacagtgtagttttggaaaaactcttagcctaccaattcttctaagtgttttaaaatgtgggagccagtacacatgaagttatagagtgttttaatgaggcttaaatatttaccgtaactatgaaatgctacgcatatcatgctgttcaggctccgtggccacgcaactc

SEQ ID NO: 331 - DNA, 500 bp, Mus musculus
  source 1..500: mol_type = genomic DNA
agtccttgctcttaactactgaaccaactctcccgtcctataagtaaattttcagagcactaatctattctacttcaagtttctcctgcatcagatccaggccagctggagcgagctacacggttaccccccctcctcccaaaggggaaaataaggatcaggtgaaaatgtttggaaattacaatagtagaatataaagaaagaatatgaaggcggccatgaaggggtagaaaggtagatgaccaggcgtcatccctgatgtcacgggtatgggcgtggtgtatgcagataagcgcgcagggtctgccgggtccgcgctccgtgcagaaatgtgaggggtttctcccgcggcgagggagggagcgcggatacgcgggtgtcagcagagcgcaagaatgtcgtgtgcgacgagggagacccgagatcggccagggctaagtgaccgtgtgttaagagtgtagaggcgacgggtgtgagccggggccgggcagtgggaaagc

SEQ ID NO: 332 - DNA, 500 bp, Mus musculus
  source 1..500: mol_type = genomic DNA
cggtggggctggctcctgtgctgcccgactcctgtgctccgacttggagaagacgggcgtccgttcgtccatacccaaaagagtcggccacaaggatgttggcacctgggggtgggccacgagcggccagttaggggtaagagacggtgcaaggtgacttgtccctggtccttcaccgctccagcactgcgccagtgagaaagtccaacaggccccgggatcgggcggcgaaaggaaggggcgtgatgtcactcctgggtggctgacggggcggggtgtatgcagatgagggtcgcgcaggggctgcggcgtccgcagcggccggggaaacgcgagagatttctcgcgcggcgtgggagagaacgcgggtcgccagatgtcagcggagcgccgagacggcgtgtgcgacgagggagacccgagatcgggcggggctaagtgaccgtgtgttaagagtgcaggggcggcgggtgtgagccggggccgggcgctgggagagc

SEQ ID NO: 333 - DNA, 500 bp, Mus musculus
  source 1..500: mol_type = genomic DNA
gctcctcctaggagctaacactggagccagggggatcaaagctgtgtagtgagtgtcacaaaacatcctagcactaaggagactgagacgggaacattgtagtaagttctagcctgggctacagtaagagacgtagtctcaaacaaggaaatgcgctataaataaataagatggagcttcaatggtctgtgcataactggggggttgaaggagccttccaaaggctgggttccggctccgttcagtcgttgacttgagctgggcggggcatgcaaataaggacgccgcctggtctccgcggaactctgggaacgaaaagcgcaacaaaatcctctcggcccccttggattcctcgggctttccctggcgtaaaggtggtggacaggatagaagaggagtttcggcgtcgggcgcgtgtttgcggtcgcgcgagtgttggcgaccgtgagttgaaggtgtgtgtggtgttgagtgtatggggcgtgtgggcgcagttcggt

SEQ ID NO: 334 - DNA, 501 bp, Mus musculus
  source 1..501: mol_type = genomic DNA
acagaatttactaaatagagagtgcagtcatggaattgccattttccccacgtggtttttcgtttgttcctcaccggaggcctccggtttgagcccgaagtctaaaccggtgcgcgtctgcgagctcgcgtgcgcctccgcggccggagcacagtcgcgggcgggcatcagggcggtgcgtggccgtcagtgacgcatgacccttcgcaggcagaagtgggacgggtcaagagaggactgtgatccgattggctgttcggcgaccgtatgctaatcgcggtgacagtctgcgtggtgtagggacacggtagcgactcaaaatgccccgtggacggggtctggagaggtgtcggtctgtcagagaaggtgtccccgcgagggcagacgcggtgtgagatagaggcgcggacagggatgtcacgggtcgtctgtgcgtcagtcgccgtgactaagatgtgggggcggccggtgcagtgcggcgcggtgtggagcgtgaggttt

SEQ ID NO: 335 - DNA, 500 bp, Mus musculus
  source 1..500: mol_type = genomic DNA
ttatctacgttggttttactacagaaactactgttctcagtaaaagcagagagagtacaatgccaacagctttgaaatcctctgtgctcttgtgccaatcccaccctcagaacagggagtctgtcggttatgttttcgtcctttacagttcttcgccgtctaatccattggaaacctcctttatttaaaggaaaccgtgtccaaattcagtgtacagaggtgcaaacctccgccccgctccttgtaggaagcccacgggaactgggccaatcggacggcgcttactcggctcatttacatacccataacacaccgcggctaatgcaaatattttcgtgaaaagatcttccattactcgaagttttaaaactaaaaacaaaatattatttcaaaagatcatgaagaaatttctgtcggtaacagcagtttcaattgataaatcaccatcacttatctaggaggttctgttactctagaagtgaattaagcaggacagctgt

SEQ ID NO: 336 - DNA, 500 bp, Mus musculus
  source 1..500: mol_type = genomic DNA
ggcatgtgattttgttttgtttaggtttttttttaactttatttgatcaacatgaaataatacaataagctatgtcttctaaccagcaggcagccagccaggagccatgtgtagcagtgttagaagctgcagcaggcatgtgggtaattgtggggagcttttaggaacagctagggagctgtgtggagctgcagagatgcagaggagcctggaggaacagaccagtgctgtgggctgggaggagcccccctcacaggtacttgctcaacggctccacgaccataagccttgaataagttacatggacattttacaaatggcacaggattgattatgtctgctgccagaagcctcatgtcgataaggagagagctggccaaaaggtaaagtatgctagctccatacagtgcaatagccacgtagtctcacagagaaagaggcaggcctgcatcatatccaaatatggccaagaattttattaaattaaaatgcaaacagca

SEQ ID NO: 337 - DNA, 500 bp, Mus musculus
  source 1..500: mol_type = genomic DNA
tatttttaatgaagcagggccatggagcccaagctggccttgaacttctcagcttttgtgctggtatcacagaaatgtggcgctatgcccggtcgggcctgatgttccagagtctttgcagtgtggggaacttgtaaggatgagactacaagacatcgggccacatcgcctgccactacttaagtccgattcacttcggctttagctccaagcctttaatctcgcgaagctctttttttttttttaacaacataggagctgtgattggctgttttcagccaatcagcactgactcatttgcatagcctttacaagcggtcacaaactcaagaaacgagcggttttaatagtcttttagaatattgtttatcgaaccgaataaggaactgtgctttgtgattcacatatcagtggaggggtgtggaaatggcaccttgatctcaccctcatcgaaagtggagttgatgtccttccctggctcgctacagacgcacttccgc

SEQ ID NO: 338 - DNA, 500 bp, Mus musculus
  source 1..500: mol_type = genomic DNA
gttctttgcttttacagaccgtctcctgtgtgtccctgtcagagacctgaattcggttcctagcacccatatgttagaacataacgtccaagttggaggctacaagtggcactaaattacacattatcagttttgacaggttggggcaccgtgtaaccctagtaacttagcgaaaggctcctcgaacccaacatcccacctctagctgggagcagctgttttgcaccagcgccgcctacctctccctccgcgtcggccagagcattcccagcaagcactgctctgatttgcatattgactcacggactttcctttactgctatacaaaaaacgacacaacagttctctttgtgaagagctttccctcagcccgagaagaatcgatagtttgccttttagcttcgacaatatacagttgaaagttggttagactttattttcacctttaccgtaagatgggtggaccgacaatgccactgtgcttccgaacgcgctcgagc

SEQ ID NO: 339 - DNA, 500 bp, Mus musculus
  source 1..500: mol_type = genomic DNA
gaagcagcgaggcccctacgagcctcgaggaaaagggaaagggccgctcaccgtcccttggccgccgtcccgcgcttccggatgagctcgtccagcgagagatcggccatcttgcggcgcgcagctagcggagaacggaggagaagccgactgcggcgagcccgccccgcggccggagtcaagagcggcttccggcaacccggacggccaactctcgcgacagctcaaacgaaaagctcgagacggaaggggtggagcctctctccccgtgagcctttgcggtgctcgcttctaatttgcatggaggagtccggagccttatgggctctctctcccccctcctccttttgctaatgaggaattagaattatatcgatcataaaccattaaaaagcattatcaagaggacaagtcttttagtcatacagccgatcggacactcaccatacttgtaatgagaatataatttcttacccctgaggaacgtagacacgttcctc

SEQ ID NO: 340 - DNA, 500 bp, Mus musculus
  source 1..500: mol_type = genomic DNA
cgcttcggtgtgtcacttcggccacagagggagacagacgattacggcccacggaaggccgcgtgagtctcgtgaagctggagatgcgctgggtctacctttcgccgtccgctccgccttggcagaggcgccgacacgcaccgaaggcagagaacccatctcgtatgggaccgcaccggacacgggcgcctgggccaggagcagagccgggccgtagaatagacatggccgtcgggggcggggcttcggaaggtttaaccaatccaaactgttgtattttgcatagccccaaagcattttggttaacagtaaaaacatcctaaatttaagtattttaatttaaacttagaacgaagcgagtataaaaaggattatttaaccctaaaacggattcaggatttgttataatatcaagtacagtcggctacataaggtcaccacatgtgtaaagttacaaaattctatggccttatatacctaccaagagcctgcttactctc

SEQ ID NO: 341 - DNA, 500 bp, Homo sapiens
  source 1..500: mol_type = genomic DNA
actttctggagtttcaaaaacagactgtacgccaagggtcatatctttttttgtattggtttgtgtcttggttggtgtcttaggtgttaatcctacagtggagggtttatgggaataggaagtaacatgtcgcctgcatgtcataggagaaaaagcgagcatcagccgtatcggctttgtaacacaaattagctatcgtgaagtccgctcagctcttccctttctaccctggctgctttttgcagggattggtccgtggtctccagtctcttgggttctcaccctgtgtgaaaatcttcgtgtttttccctaccccccagtcacctcttacacagcctctgcttccaagcgcagcccccacaggagtttgtaggatttctgtgctagcggggaatgtgttctcacctcatagagccaggtagaaattatgcagatgggcagttctctgggaagaaagcagggcctttggggctctcagtgtccccgttgggttgtagaca

SEQ ID NO: 342 - DNA, 500 bp, Homo sapiens
  source 1..500: mol_type = genomic DNA
actttctggagtttctaaaagtagactgtacgctaagggtcatatctttttttgttttggtttgtgtcttggttggcgtcttaaatgttaatcctacagtggagggctggcgaataggaagtaacatgtcgcctgcacgccataggagaaaaagcgagcatcagccgtatcggctttgtaacacaaattagctatcgtgaagtccgctcagctcttccctttctaccctggctgctttttgcagggattggtccgtggtctccagtctcttgggttctcaccctgtgtgaaaatcttcctgtttttccctaccccccaagtcacctcttacacagcctctgcttccaagcgcagcccccacaggagtttgtaggatttctgtgctagcggggagtgtgttctcacctcatagagccaggtagaaactacgcagatgggtgctgttctccaggaagaaagcagggcctttggggctctcagtgtccccgttgggttgtaga

SEQ ID NO: 343 - DNA, 500 bp, Homo sapiens
  source 1..500: mol_type = genomic DNA
actttctggagtttcaaaaacagaccgtacgccaagggtcatgtcttttttcgtattggtttgtgtcttagttgttaatcctacagtggaggcctggggaataagaagtaacatgtggcctgcacgccataggagaaaaagcgagcatcagccgtatcggctttgtaacacaaattagctatcgtgaagtccgctcagctcttccatttctaccctggctgctttttgcagggattggtccgtggtctccagtctcttgggttctcaccctgtgtgaaaatcttcgtgtttttccctaccccccaagtcacctcttacacagcctctgcttccaagcgcagcccccacaggagtttgtaggatttctgtgctagcggggagtgtgttctcacctcatagagccaggtagaaattatgcagatgggcgctgttctctgggaagaaagcagggcctttggggctctcagtgtccccgttgggttgtagacataacactctta

SEQ ID NO: 344 - DNA, 304 bp, Homo sapiens
  source 1..304: mol_type = genomic DNA
cctccggggatacaacgtgtttcctaaaagtagagggaggtaagagacggtagcacctgcggggcggcttgcacgccgagtgcctgtgacgcgccggcttaacttaactgcttccctgaagtaccttgaggttcctgatgtgcgggcggtagacggtaggcttatgcggcacgctgtcgtttccaccgtggctactgcgctttgggaaggccacgacctcctcctttggggaggtccttaggatctcagcttggcagtcgagtgggtggcgaccttttaaaggaatgggacccacccggagttc

SEQ ID NO: 345 - DNA, 492 bp, Homo sapiens
  source 1..492: mol_type = genomic DNA
ttcccttcttgtaatacaaaataataacaaccacagaggacatcgcaagtaaaatgtgtataacaaccccatctaaagaaccctatcatctttctactatctgtctacctaaatatgtatagtataaataaccctatatagcactctaagcaacttaagttaggtaacttagaaaactcttttttttttttgagactgagtctcactctgtcgcacccaggctggagtgcagtggcgtgatctcggctcactgcaacctccaccttctgggttcaagtgattctcccatctcagtctcccaagtagctgggattacaggcacgccaccatgccctgctacatttttttttttttagtagagatgaggtttcaccacattggccaggctgttctcgaactcctgacctcaggtgatccgcccaccttggcctcatgaagtgctgggattacaggtgtgagccactgtacccagccagaaaactcttaaaaaac

SEQ ID NO: 346 - DNA, 382 bp, Homo sapiens
  source 1..382: mol_type = genomic DNA
ctgaattttcttgcagttgaacaacagaggctttttttgtgtgtgtgggggtgcttggttttgggaggttgaagagtacttgttcgcaaactctctaaatgagagatggggaagtgtcttaccagctgattcgcgagagcacctgcaagtttacctgttttagtgatttgcgtttatgaaagttggagttgctgattttgtgatctctacttttaaggtaaaagcagggcggtgttgacttttcttgccagttggctgtcctgttttctttctcgcactgttttctttttgagacgaagtctgtcgctcaggctggagtgcactggcgtgatctcggctcgctgcaaactttgccgaacccctgtttagcgatttccgtttg

SEQ ID NO: 347 - DNA, 500 bp, Homo sapiens
  source 1..500: mol_type = genomic DNA
atatgtggtaatccaacaatagaaattatttttaagtttgtgtgttcctttttctgttcaatggtgcttttgatattgttgtaaagcagtgactagcagattctgtgtggtaaaagcactgaaccctgtttagttcttttctccctaccttattggtaattatttctgtgtatatatgttccaaagaaatgcggcttgtatattcatgcttttcaactttttgtgatagacagttgatacacaagtagtacctcctccgggatcttcttagtcaagactgtttggtagatgcatgttttttgttacttgtaatgtacagtattcagttcattttctttttgcagcactgtccggttgaaacacaacgcgaggatcgggcgtggtggctcacgcctgtaatcccagcactttgggaggccgaggcaggacaatcaagaccaatcctggtcatcaaggcaggagaatcaagaccatcgaggtcaggagatcaagaccatcct

SEQ ID NO: 348 - DNA, 498 bp, Homo sapiens
  source 1..498: mol_type = genomic DNA
acatcaggttgtttttctgtttttacatcaggttgtttttctgtttggttttttttttacaccacgtttatacgccggtgcacggtttaccactgaaaacacctttcatctacaggtgatatcttttaacacaaataaaatgtagtagtcctaggagacggaatagaaggaggtggggcctaggcagattcatctctgcggtgcattttgcctctggccctcgggccctagtttgcgatctttcccatcttgcctctgcttccctctgcacaatcctgagtattgcagtaccttacacttaaggaaatttcgtcttgccaaagttgatccatttcagctccgaaacataacaggaactagtgcaacgataaacgtatgaggaacttgcaataagagtgacagaatcctttgaatcaaaaaaaaaaaaagccaccacttaatgagtatctaccatatgtcaagggcttcaccaatatttcattgaaatattccagacca

SEQ ID NO: 349 - DNA, 500 bp, Homo sapiens
  source 1..500: mol_type = genomic DNA
cttatgatgtttgttgccaatgatagattgttttcactgtgcaaaaattatgggtagttttggtggtcttgatgcagttgtaagcttggggtatgaaggtttgggccacgcctgggcgcttccggctgcgccggatgctgtttcctttccgctcccaggggcgttgggaacggttgtaggacgtggctctttattcgtgagttttccatttacctccgctgaacctagagcttcagacgccctatggcgtccgcctcgacccaaccggcggccttgagcgctgagcaagcaaagggtgagaatcgtcctagtcaaggcataggctgctggcctggggtagtcaaggcatgggctgctggtctggggaggatgcgggcggaggatgtggggcgacaaacctggctacgtccgccgggaaaatggggtaggggacgccgggtaccgtccttctaagtggggcgcttgcccccaagacttgggatcttattgggttacctaca

SEQ ID NO: 350 - DNA, 498 bp, Homo sapiens
  source 1..498: mol_type = genomic DNA
tctttactgttatatgttaggcgaaatattacgcgtttggagtaagtggtgctttttgtaactgaaaagagattctgtgtgtgtttttttttttttagaggctgcatagttatttgtatgaaccgcaggtgacctaattagcaaggtaattcagacctgtatcctagcacttaagaagtggaagtgggataaccctgcgtgttctcgtgtgggaggctagcttaagcaacaaagcaggaaggccccaccaacaaaagaatttaaaaattatacgtgcgtggtggcgcgcgtatgaggaaattatttggcaactgtgttacagtatagcagcaaatggaatagacctagtccctgactttaggagacctgcctcagccccccgaatggctgggactacaggcgtgcgcctccgcgcccagctaatttttgcatttttggtagagacgggttcaccatgttggccaggatggtctccatctcttcatctggtgatccgcc

SEQ ID NO: 351 - DNA, 500 bp, Homo sapiens
  source 1..500: mol_type = genomic DNA
accttattcacgcctaaaaagtagactgactgtggggtggtcgtgttttttgtttcttgttggtaggtggtgaatgcgtttttttcgttgttttctccgttactcaggctgccagttgcttggcagtcttgtcgctggctgtggacgctctgcacttcatcaccgtccccagctgcgctttgagccggtctaaggttgcccacagtattgacgttgggacccacgaaactggcaatttccatgtgtgcggccttacccagttctcccaaacttctgcgtataaccgcttctctgtgcttcagaaagataagtccggccccggcctcacacagcagctcagttcgtgacagcgtttaatatgtaaaatggagcaaataatttatagggcgttgggagagttaaagagactaattcatttacgtgttaaatacagggaatggcttttgcattgatataaccccagcctccagcatgcgccagacctgacgtaggtgttcggc

SEQ ID NO: 352 - DNA, 500 bp, Homo sapiens
  source 1..500: mol_type = genomic DNA
tttgacccattacccatctaagttagatgcttttttaaatgttttttaatttttaaatttttaatttttttcattatttattttttatttttgagacggatctcggctcactgtaacctccacctcccgggttcaagcgattctcctgactcagcctcccgagtagctgggattacaggcgcgcgccaccatgcccggctaatttttctatttttagtaaagacggggtttcgccatgttgaccagggtggtcttgaactcctgacgtcaggtgatcctcctgcctcgtgctgggattgcaggcgtgagccaccgctcccggcccttagatgctttttaatcagcaagtacgcaatgctttcctgacaggaatgtcaagtccgtcaggaaatccacataagggtgttaagcaggcaaagtaccacatacagattaaaatcaaaagcactgtcaacgcttatttaatttatacagtagaccctaacttttctaattttgtg

SEQ ID NO: 353 - DNA, 500 bp, Mus musculus
  source 1..500: mol_type = genomic DNA
gtttacttggttttaaaaatagcttgcactagcgataccgcgaatatggttattaggtttgttaggcacagtcgtgtcttactatagaaaaataacgtagtgttcattttgctgcctgtatgtgttaatttgtccttattgcgccattgttcttgttaagtcttctgtaaggagttgcgggtttcaaactgtcagtctgagagcataagctcacttttcagtcagttgaattgaatgttacattcgattggttctggatattgatattacccaaggcttgtcctgtttgtaagtcttttcctacacctgacaatatgattatgtttacaatgtccctagaactctgggtgtatcgttcccactgaataaaatttgatctctaagttgacctataaatttaagtaccaaaaaactggtttgtaagattttggaaggcagaggcagggaagagaccaacgtggtctacatataaagtaccaggtacatataaagtaccaggt

SEQ ID NO: 354 - DNA, 496 bp, Mus musculus
  source 1..496: mol_type = genomic DNA
atttttgtggtgctaaaagttagattgcattccgcccttctcacgtctctttacgtgttgtttgcgaggcgtggcctcggaggtaaatggtctccttttacctcagataagcttacctttgctctgtgagtaagaatgtagctacacttccaaatttagctattgtcctttgcggtccaaatgaaaatattaccttccgatctaacaatgttaaactagtcccaggcccttctatcgattgccagaatagactagactactacacagacacaccctctcaaatcaggccagctcctgcaacctgcacctacagtttgtcccctgggacaaatgaaaggacaggccctctttcccccccccccccaaatcagagcacacacagatcttggggtctggggcagaaatttcgttcatggaaaaaacaaacaaacaaacaaacacgatcaaaggaagctcgttccctttggcctcagggtttcttagacgccgtgttccc

SEQ ID NO: 355 - DNA, 497 bp, Mus musculus
  source 1..497: mol_type = genomic DNA
ataactggtaaccaaaagcagattactttcccccttgtggtcttcgcgtttgcggacgggagagaactttcggccattttccttttagaaatttaacttcttgaaggccaccaggtgacccttacttccctctcacctttccttctacctgtactttctctattaaaaagcctgcagaagtacccttgacaaattgccaaaaatgacacctaaaaaaaaaaaaaggaaaaacgacaccttaggtaattataggttgtaagaaaaagatttgacctcttggagtttttatttcttaataccaaaggacacccaaggaacgtatctctcaaaattgggtttcaaacctcagccgtttccttcttagttccagtgcttaacacgcaacagacctgcacaccactacactgcatacgagttttaaagttaataaatcagtcacccctccatagtcttctacctacttgaagacagaaacggctgctaggaagcaattcttc

SEQ ID NO: 356 - DNA, 500 bp, Mus musculus
  source 1..500: mol_type = genomic DNA
ctggggaataagagtggtttaaagaaagaacaatttgagagatctgcttagatctaataaaacccaagtatagtttctttagacgtcttatatctcacgtaggacctcttatttcagactcactgcaagaacaagctaaagaactatatacagtcaggaacaaggtgagccatcgcggttctcagtcccatgatcttaagagtttttcctcttcccctcttccctggctgtcctggagctcactctgtagaccaggctggtctcaaactcagaaatccacttacctctgcctcccaagggctgggattaaaggcatgcaccaccattgcccggcagggtatgtggactatgctgtccttcaactcagagatcgtggtactttaaatctcattttccgaaagaaaagaaaagaaaggaaggggggaaataaagccagtatattttgcacccacaatctgaagttctacaaatattgttagaaaatgcaaaggacccaagtc

SEQ ID NO: 357 - DNA, 500 bp, Mus musculus
  source 1..500: mol_type = genomic DNA
ctcggtttatcttaaagggttttaaatatagaaagcttccttagtcttatgggtgagagtgctgtttaagccttacctaggtatgtctttgaacatttattacagattgttatttgtgactatgaccactcaggtgttctgttcttgtgaatttagacacactcagaaaggctacacactcaaagaccacaccaaagtgaagtactatctgggccgtgaaactggtcacatatcagttattttgcagtaaaacaaggaagtcaatcatactgcttcagtgggtcagggagtcaagaatgcacagtacaagagctggtgagattcctcagcaggtaagagcactgaatgctcttccaaagattctgagttcaaatcccagcaaccacgtggtggatttgaacaaaggatgaaaacaaccatccataaccagatctgatgccctcttctggagtgtcaaaagacagctatggtgtacttacataaataaataagtaaaaaca

SEQ ID NO: 358 - DNA, 500 bp, Mus musculus
  source 1..500: mol_type = genomic DNA
ccacattttgtgtttaaaaatagaaatatttaagtgagatcagtttaaatctgctttatctagggtgtctaactgcttgcatctttttaacttttccttatttgtgagaaggtctgtaaaacttattatatgttagtacactgtagctgtcttcagacactccagaagagggattcagatcaccttacagatggttttgagccaccatgtggttgctgggatttgaactcaggacctttagaaaagtagttgggtgctcttacccgctgagccatctcaccagccctttttttttcttttttccagttcgggtttctctgtgtgtagccctggctgtcctggaactcattctgtagaccgggctggcctcgaactcagaaatctgcctgcctctgcctcccaagtgctgggattaaaggaatgtgccttcattgcccggctctagggctttttgttgttgtttgtttgtttgtttgtttgtttgcttttgtggatggcct

SEQ ID NO: 359 - DNA, 500 bp, Mus musculus
  source 1..500: mol_type = genomic DNA
aaaaccagtaagggagaaaggtcaagtaacatataaaggaaggcctatcagaattacaccagacttttcaccagagactatgaaagccagaagagcctggacagatgttatacagacactaagagaacacaaatgccagcccaggctactatacctggccaaactctcaattaccatagatggagaaaccaaagtattccacgacaaaaacaaattcacacaatatctttccacgaatccagcccttcaaaggataatgacagaaaagaagcaatacaaggacggaaatcacgccctagaacaaccaagaaactaatcattcaacaaaccaaaaagaagacagccacaagaacagaatgccaactctaacaacaaaaataaaaggaagcaacaattacttttccttaatatctcttaatatcaatggactcaattccccaataaaaagacatagactaacagactggctacacaaacaggacccaacattctgctgctta

SEQ ID NO: 360 - DNA, 500 bp, Mus musculus
  source 1..500: mol_type = genomic DNA
cccaatttcactggtctacaatgaaagcaaaacagttctcttccccgctccccggtgtgtgagaggggctttgatccttctctggtttcctaggaaacgcgtatgtgctagagccacgctctgagacttccgcctcgtgcggtcccgcttcctttctgcctcctctggcctgcatccgtgggggaggtggctggctgcagggttctccggatctcttctgtgttcccactactcaagcaccgagtggcgttctatggcgtccgcctcggctcagcccgcggccctgagcgcggagcaggccaagggtgaggaaagagcctagtctgggtgtgggccgtcttctggggggagggcgcgatactattctttgcctctccaagtggggcccttgcccattagggcgaagggttgggaggacaagcttatcgggttgcttgcaggcctcggcccactaattccctgcctcttccctcctctgggctcgcccgccgtcctccgcg

SEQ ID NO: 361 - DNA, 500 bp, Mus musculus
  source 1..500: mol_type = genomic DNA
gaatttgttaaattacaggaggaagcttttttagttcattttacaaatactttcttgttaggtagataataccttctaaggttattatctggatcttctaagtctttttatcgctagcaagtctaagtttctggactttggaattagaagttaatgtcgtaggcgggcatggtggtccacgcctttaatcccagagtttgggaggcagacgcaggtggttttctgagttcgaggccatcctgctcttcaatgttagttccaggacagccagggttatacaaagaaaccctgtctcgagaaacaaaacaaacaaaaaaagagtagctgagtgctctgagttgtctctccagccccttagctatttattttcatttaaattatttttgttttattcgcttgtgtgcctgagtttgaatttcccgggattaacagttgaagactagggctggtgagatggctcagcggttaagattgccgactgctcttccaaaggtcctgag

SEQ ID NO: 362 - DNA, 500 bp, Mus musculus
  source 1..500: mol_type = genomic DNA
accccctaattctacaagaatagaaagcttagcagctcctctgaatggttgctctcaggtgctagtggttgcaagtcgtatgttgatgcctgcctttgccctacctggtgtgtgagcgtgagcgcgccccacctctccagcctctctcttactgtttttcagacaagatgggactgttgttctcctactgctatgtacctcaatttcaattgatcatgcctggacataactgcccatgttgtaaggtcgtctacgttgtaaggtcgtgctcagtttctgatgcctagactagtcacctttccgtttgcctcctgactgtgtaaatgaggcaaatgaaggtggtctcttaactgacatgttagtgtttgacctatgggatagtttctcattgttgagacagaatttctagaagctggtccgctgagcggctaagagcacttgctgatattgcaaaggatctacctgggtttggttctcagcactcacatggaagttcacat

SEQ ID NO: 363 - DNA, 67 bp, Mus musculus
  source 1..67: mol_type = genomic DNA
tgtagttcctgcaatttaattttcgtttaaaactttattttattctttaacttaaaaaaaatatata

SEQ ID NO: 364 - DNA, 6383 bp, unidentified
  source 1..6383: mol_type = other DNA
ggcctccgcgccgggttttggcgcctcccgcgggcgcccccctcctcacggcgagcgctgccacgtcagacgaagggcgcagcgagcgtcctgatccttccgcccggacgctcaggacagcggcccgctgctcataagactcggccttagaaccccagtatcagcagaaggacattttaggacgggacttgggtgactctagggcactggttttctttccagagagcggaacaggcgaggaaaagtagtcccttctcggcgattctgcggagggatctccgtggggcggtgaacgccgatgattatataaggacgcgccgggtgtggcacagctagttccgtcgcagccgggatttgggtcgcggttcttgtttgtggatcgctgtgatcgtcacttggtcggtaagtttagtctttttgtcttttatttcaggtcccggatccggtggtggtgcaaatcaaagaactgctcctcagtggatgttgcctttacttctagggtacgccaccatgggcacaactactgaaacagaaataagaaagagacggtccagttcttatcatgtttccatggatttattggaagatcctacatcaaggcaaagagcaatgagtatagccagtattttgaccaacaccatggaaggtatgttaaaagtcctgcgtcacagttacttggtgctttggtaatgatgaaaaaacacttcataaatttcaataaaatacttcctgacttgatattgtatcattattacacattttactaaataacagtaaaatccgtgcataactcatggattctattatcttccacagattttttttttttatatttagcctccagaaagctgctgcaaatgtaaggtatattttgaacaccactttcatacattaaattctaaacattgaaacttgtgtgcatgacgttgaaaagagtgtaatgataaatgcttatacttatgatgatgctaagccatttggattatattaactgcttgagacacaagttataaaatcctatgacttaaccagaaatataaattaaaaatgtgaattagggtttgatattaacttccttgaagcaaagtgtttaaaattttgtagtcctacttttgcctttctctgaccagattcttacaatatatcagctttctctttagttgcagattttatctgaatagttaacataatgtgtagcagtctggatctcagaatgccaaaataaagactttggggacagcttaatctgtgatcaatttctggctctgccatatgttaaatgtgttaatttgtgactttgaatttcagtctcctcatcagtaaaatgtggatgatgatgtttaggcataaggttgttgaatggattaaataagccttcttagataaaacactgatgtatttggcatgcagaagacagttaataaatattatcaatattagttgttttgttgttgttatttttgttaattcacatgtttttgcctttccatactgtaagtgaattcaaacaactgtcaacttcaactacttggaaaatattttcatgtaaaatgtattctatcccccttccttgccctcctattccctcctctccctatctctttacaaaccttctcccttgtaccccttcccaggtatgtgtgtgagtgtgagtgtgtgtagatgtgtcaagggagaagagaaaaggagaatgaaagcaaaagagagcaagcatacacgtccctttcttattgataattagattttctcttgagattggatagattcctggaataattcttttcctgtctgtatgcaaagatcccataatattattaataccaatacgaaaagcctgaaaatcacagccagaaaaaattcacagtgtagacgactgtgtacatcacagacaagtcagtattacaaaacccaattttcatagtgtcctatttcagtatcctaatgcaattcactgatttcaattgaatattaaactctagtacgttcttccccaacctcgcctgcgttagcttgcactccctcttccccccagctgccagtagcttgctcctccctgtccctccaggtaaatcttttgaagattgtctggccttccgctccttgccatagcaaaaccactgagaggaagctgccagtggttctgctaccgatgtcagcagcatgtctgctccctaaagcaggaagtagagaaggagacagggtaagtctaaatcaacagtcatgctttgcacttctgatagcattaagtttgagctaaataagacattacttaaaaaacctcaaatatccacaagattggacttgccaactaattaagatttggagttcaaaataaatgcacccacacctttctccatggaactatgtgacatggggttgcttaggatggaaaggatgttctaggaataagtgcaatctaggaagctgaagactgagagtgttttcgttttattatctgcagagcttttgacttgtgtatttgtgagaaataatggccaagtttttattctgtttttaatcagttatctagaatgaaaactgacttttctttattcaattgtatgtagacacattgagtgtgacatttgtcaaggttggttgttagcaatatcacatacatgcatactcaagcagacttaagatagtcctttttttttttttttttttttttggtttctgataatggtgcaaagttttcctggttgacataatctcttttcttggggatcctttcttctatgtctgattattgtttatttcacctttcctttttatgaaccaggcttgttgatccggttggcaatttttgttctccttctttttaactacagccaagtctccgttgtccagggtaatggatagcctcatgcttaatgaagcagtagtggataagcaaaaatgaaccatttgcgtttcaaatttttaaaagtgcaaaatcacatagaaatgttttctggtcacacctttgtgaaggatggtgggagggtgagttagaagcgcctgaagaatcaaggtgagccagcaaaagacacagatttactgtaagtgattctatgtggataacccatgcaggaataatggagatgtggctgcagttctctcctgaatgctttgctttgttttaaagtgtgagattccccccttttttttggaatgaataattgaatgattttattttagaacttaaacaactttgctccggttaagttgatgaagagattatcttgccaaaggaagatggtagacagtttttcacttcctaattccccaaatttctttgccaatattcaccaaatttcagtattttgggtgtgaccttaaagatctgtgcatttctgtcttctctcccaatgtttggttgaaattcttcttgacatcattgtacattttccttgaataaatgcattttaatataaaattttatgtcatgtttgatatgagagttatatatttaaatacatttaaataaatgtttaccatgaaaatgtatgaattatatgtatgtttcacctaaaatcctttgtatttttccagtaataaatgagttccactttgtgaaatgttgatttgtaacaacagtgaggactccagttccttaggctggggtattttctcttcttttatgccctctagttaaatgagaaatgtagagagatggaactttgttgtgtctaatatgcaagcctataatctaataaaatttaatttgagacttttaaactgagattggtgacactgacaaaattatctaattagaagatcaccaaaacatatctaatccaagaaactgacattcagtgtgactgattaaggttcttaggacatctcctgagatatctctgataacatatatacttcttgctctacctggaacatggatgagctttaagtgtatgcaatgcaagttctacccattagtttctagcagccttgaagataagtatcagacagtttagtgttgccaatagaatcttggaagctatgtttagccaggatacatttggaaagcttactagcctttctgtactgatcctttctatgacagcaaacccattgtaaaattttccctgttcctccagcagattaacccataatatcttttaacaactttagattttttaaattccttttaatttaaaccaaatctgcttaatagaaagtaagcagttttcatgaggattctaactttttttcttccagaacttgaagaatccagacagaaatgcccaccatgctggtataaatttgctaatatgtgtttgatttgggactgttgtaaaccatggttaaaggtgaaacaccttgtcaacctggttgtaatggacccatttgttgacctggccatcaccatctgcattgtcttaaatacactcttcatggctatggagcactatcccatgacggagcagttcagcagtgtactgtctgttggaaacctgcttggcagcggcgagggcagaggcagtctgctgacatgcggtgacgtggaagagaatcccggccctcttaagcaaaggaaatctggccgctctgctgggaagtatgatgtgtatttgatctccgggatggaagacgccaaaaacataaagaaaggcccggcgccattctatccgctggaagatggaaccgctggagagcaactgcataaggctatgaagagatacgccctggttcctggaacaattgcttttacagatgcacatatcgaggtggacatcacttacgctgagtacttcgaaatgtccgttcggttggcagaagctatgaaacgatatgggctgaatacaaatcacagaatcgtcgtatgcagtgaaaactctcttcaattctttatgccggtgttgggcgcgttatttatcggagttgcagttgcgcccgcgaacgacatttataatgaacgtgaattgctcaacagtatgggcatttcgcagcctaccgtggtgttcgtttccaaaaaggggttgcaaaaaattttgaacgtgcaaaaaaagctcccaatcatccaaaaaattattatcatggattctaaaacggattaccagggatttcagtcgatgtacacgttcgtcacatctcatctacctcccggttttaatgaatacgattttgtgccagagtccttcgatagggacaagacaattgcactgatcatgaactcctctggatctactggtctgcctaaaggtgtcgctctgcctcatagaactgcctgcgtgagattctcgcatgccagagatcctatttttggcaatcaaatcattccggatactgcgattttaagtgttgttccattccatcacggttttggaatgtttactacactcggatatttgatatgtggatttcgagtcgtcttaatgtatagatttgaagaagagctgtttctgaggagccttcaggattacaagattcaaagtgcgctgctggtgccaaccctattctccttcttcgccaaaagcactctgattgacaaatacgatttatctaatttacacgaaattgcttctggtggcgctcccctctctaaggaagtcggggaagcggttgccaagaggttccatctgccaggtatcaggcaaggatatgggctcactgagactacatcagctattctgattacacccgagggggatgataaaccgggcgcggtcggtaaagttgttccattttttgaagcgaaggttgtggatctggataccgggaaaacgctgggcgttaatcaaagaggcgaactgtgtgtgagaggtcctatgattatgtccggttatgtaaacaatccggaagcgaccaacgccttgattgacaaggatggatggctacattctggagacatagcttactgggacgaagacgaacacttcttcatcgttgaccgcctgaagtctctgattaagtacaaaggctatcaggtggctcccgctgaattggaatccatcttgctccaacaccccaacatcttcgacgcaggtgtcgcaggtcttcccgacgatgacgccggtgaacttcccgccgccgttgttgttttggagcacggaaagacgatgacggaaaaagagatcgtggattacgtcgccagtcaagtaacaaccgcgaaaaagttgcgcggaggagttgtgtttgtggacgaagtaccgaaaggtcttaccggaaaactcgacgcaagaaaaatcagagagatcctcataaaggccaagaagggcggaaagatcgccgtgtaattctagagtcggggcggccggaattcagatctaccagacatgataagatacattgatgagtttggacaaaccacaactagaatgcagtgaaaaaaatgctttatttgtgaaatttgtgatgctattgctttatttgtaaccattataagctgcaataaacaagtt

SEQ ID NO: 365 - DNA, 533 bp, synthetic construct
  source 1..533: mol_type = other DNA
taaagactgtgcatccgactcctacatttatgaaagtaaatgcctattgttagaacaaaaaaggctacagaacaaaaaacaaagcgaaataccatctgctttaggttcagtggtattttcccgctgacagggaggcgggtttttgggtacaggaaacgagtcactatggaggcggtactatgtagatgagaattcaggagcaaactgggaaaagcaactgcttccaaatatttgtgatttttacagtgtagttttggaaaaactcttagcctaccaattcttctaagtgttttaaaatgtgggagccagtacacatgaagttatagagtgttttaatgaggcttaaatatttaccgtaactatgaaatgctacgcatatcatgctgttcaggctccgtggccacgcaactcaatgatagggacttagggtgagaaatattcctctaacattctacaaatttttggagcaggttttctgacttcggtcggaaaacccctactttctggagtttcaaaagtagactgtacgctaa

SEQ ID NO: 366 - DNA, 559 bp, synthetic construct
  source 1..559: mol_type = other DNA
taaagactgtgcatccgactcctacatttatgaaagtaaatgcctattgttagaacaaaaaaggctacagaacaaaaaacaaagcgaaataccatctgctttaggttcagtggtattttcccgctgacagggaggcgggtttttgggtacaggaaacgagtcactatggaggcggtactatgtagatgagaattcaggagcaaactgggaaaagcaactgcttccaaatatttgtgatttttacagtgtagttttggaaaaactcttagcctaccaattcttctaagtgttttaaaatgtgggagccagtacacatgaagttatagagtgttttaatgaggcttaaatatttaccgtaactatgaaatgctacgcatatcatgctgttcaggctccgtggccacgcaactcaatgatagggacttagggtgagataatggtcacaggcggaagggatcgaatcagagtcatgcggaggtgtaaatttttggagcaggttttctgacttcggtcggaaaacccctactttctggagtttcaaaagtagactgtacgctaa

SEQ ID NO: 367 - DNA, 539 bp, synthetic construct
  source 1..539: mol_type = other DNA
taaagactgtgcatccgactcctacatttatgaaagtaaatgcctattgttagaacaaaaaaggctacagaacaaaaaacaaagcgaaataccatctgctttaggttcagtggtattttcccgctgacagggaggcgggtttttgggtacaggaaacgagtcactatggaggcggtactatgtagatgagaattcaggagcaaactgggaaaagcaactgcttccaaatatttgtgatttttacagtgtagttttggaaaaactcttagcctaccaattcttctaagtgttttaaaatgtgggagccagtacacatgaagttatagagtgttttaatgaggcttaaatatttaccgtaactatgaaatgctacgcatatcatgctgttcaggctccgtggccacgcaactcaatgatagggacttagggtgaacattactttgaacttaacactactagaagaatttttggagcaggttttctgacttcggtcggaaaacccctactttctggagtttcaaaagtagactgtacgctaa

SEQ ID NO: 368 - DNA, 533 bp, synthetic construct
  source 1..533: mol_type = other DNA
taaagactgtgcatccgactcctacatttatgaaagtaaatgcctattgttagaacaaaaaaggctacagaacaaaaaacaaagcgaaataccatctgctttaggttcagtggtattttcccgctgacagggaggcgggtttttgggtacaggaaacgagtcactatggaggcggtactatgtagatgagaattcaggagcaaactgggaaaagcaactgcttccaaatatttgtgatttttacagtgtagttttggaaaaactcttagcctaccaattcttctaagtgttttaaaatgtgggagccagtacacatgaagttatagagtgttttaatgaggcttaaatatttaccgtaactatgaaatgctacgcatatcatgctgttcaggctccgtggccacgcaactcaatgatagggacttagggtgatagaagtgcaaagcatgactgtcaaatttttggagcaggttttctgacttcggtcggaaaacccctactttctggagtttcaaaagtagactgtacgctaa

SEQ ID NO: 369 - DNA, 1087 bp, synthetic construct
  source 1..1087: mol_type = other DNA
tttcttttgtaatccgaaacattctagtctgcgaattaaaagccattatttgaagaaggatgccccggctccatctggccaccgaaagattgctccttaacacaggctaaggaccagcttctttgggagagaacagacgcaggggcgggagggaaaaagggagaggcagacgtcacttcctcttggcgactctggcagcagattggtcggttgagtggcagaaaggcagacggggactgggcaaggcactgtcggtgacatcacggacagggcgacttctatgtagatgaggcagcgcagaggctgctgcttcgccacttgctgcttcgccacgaagggagttcccgtgccctgggagcgggttcaggaccgctgatcggaagtgagaatcccagctgtgtgtcagggctggaaagggctcgggagtgcgcggggcaagtgaccgtgtgtgtaaagagtgaggcgtatgaggctgtgtcggggcagaggcacaacgtttcaatgatagggacttagggtgatagaagtgcaaagcatgactgtcaaatttttggagcaggttttctgacttcggtcggaaaacccctactttctggagtttcaaaaacagactgtacgccaagggtcatatctttttttgtattggtttgtgtcttggttggtgtcttaggtgttaatcctacagtggagggtttatgggaataggaagtaacatgtcgcctgcatgtcataggagaaaaagcgagcatcagccgtatcggctttgtaacacaaattagctatcgtgaagtccgctcagctcttccctttctaccctggctgctttttgcagggattggtccgtggtctccagtctcttgggttctcaccctgtgtgaaaatcttcgtgtttttccctaccccccagtcacctcttacacagcctctgcttccaagcgcagcccccacaggagtttgtaggatttctgtgctagcggggaatgtgttctcacctcatagagccaggtagaaattatgcagatgggcagttctctgggaagaaagcagggcctttggggctctcagtgtccccgttgggttgtagaca

SEQ ID NO: 370 - DNA, 1087 bp, synthetic construct
  source 1..1087: mol_type = other DNA
tttcttttgtaatccgaaacattctagtctgcgaattaaaagccattatttgaagaaggatgccccggctccatctggccaccgaaagattgctccttaacacaggctaaggaccagcttctttgggagagaacagacgcaggggcgggagggaaaaagggagaggcagacgtcacttcctcttggcgactctggcagcagattggtcggttgagtggcagaaaggcagacggggactgggcaaggcactgtcggtgacatcacggacagggcgacttctatgtagatgaggcagcgcagaggctgctgcttcgccacttgctgcttcgccacgaagggagttcccgtgccctgggagcgggttcaggaccgctgatcggaagtgagaatcccagctgtgtgtcagggctggaaagggctcgggagtgcgcggggcaagtgaccgtgtgtgtaaagagtgaggcgtatgaggctgtgtcggggcagaggcacaacgtttcaatgatagggacttagggtgatagaagtgcaaagcatgactgtcaaatttttggagcaggttttctgacttcggtcggaaaacccctactttctggagtttctaaaagtagactgtacgctaagggtcatatctttttttgttttggtttgtgtcttggttggcgtcttaaatgttaatcctacagtggagggctggcgaataggaagtaacatgtcgcctgcacgccataggagaaaaagcgagcatcagccgtatcggctttgtaacacaaattagctatcgtgaagtccgctcagctcttccctttctaccctggctgctttttgcagggattggtccgtggtctccagtctcttgggttctcaccctgtgtgaaaatcttcctgtttttccctaccccccaagtcacctcttacacagcctctgcttccaagcgcagcccccacaggagtttgtaggatttctgtgctagcggggagtgtgttctcacctcatagagccaggtagaaactacgcagatgggtgctgttctccaggaagaaagcagggcctttggggctctcagtgtccccgttgggttgtaga

SEQ ID NO: 371 - DNA, 1087 bp, synthetic construct
  source 1..1087: mol_type = other DNA
tttcttttgtaatccgaaacattctagtctgcgaattaaaagccattatttgaagaaggatgccccggctccatctggccaccgaaagattgctccttaacacaggctaaggaccagcttctttgggagagaacagacgcaggggcgggagggaaaaagggagaggcagacgtcacttcctcttggcgactctggcagcagattggtcggttgagtggcagaaaggcagacggggactgggcaaggcactgtcggtgacatcacggacagggcgacttctatgtagatgaggcagcgcagaggctgctgcttcgccacttgctgcttcgccacgaagggagttcccgtgccctgggagcgggttcaggaccgctgatcggaagtgagaatcccagctgtgtgtcagggctggaaagggctcgggagtgcgcggggcaagtgaccgtgtgtgtaaagagtgaggcgtatgaggctgtgtcggggcagaggcacaacgtttcaatgatagggacttagggtgatagaagtgcaaagcatgactgtcaaatttttggagcaggttttctgacttcggtcggaaaacccctactttctggagtttcaaaaacagaccgtacgccaagggtcatgtcttttttcgtattggtttgtgtcttagttgttaatcctacagtggaggcctggggaataagaagtaacatgtggcctgcacgccataggagaaaaagcgagcatcagccgtatcggctttgtaacacaaattagctatcgtgaagtccgctcagctcttccatttctaccctggctgctttttgcagggattggtccgtggtctccagtctcttgggttctcaccctgtgtgaaaatcttcgtgtttttccctaccccccaagtcacctcttacacagcctctgcttccaagcgcagcccccacaggagtttgtaggatttctgtgctagcggggagtgtgttctcacctcatagagccaggtagaaattatgcagatgggcgctgttctctgggaagaaagcagggcctttggggctctcagtgtccccgttgggttgtagacataacactctta

SEQ ID NO: 372 - DNA, 891 bp, synthetic construct
  source 1..891: mol_type = other DNA
tttcttttgtaatccgaaacattctagtctgcgaattaaaagccattatttgaagaaggatgccccggctccatctggccaccgaaagattgctccttaacacaggctaaggaccagcttctttgggagagaacagacgcaggggcgggagggaaaaagggagaggcagacgtcacttcctcttggcgactctggcagcagattggtcggttgagtggcagaaaggcagacggggactgggcaaggcactgtcggtgacatcacggacagggcgacttctatgtagatgaggcagcgcagaggctgctgcttcgccacttgctgcttcgccacgaagggagttcccgtgccctgggagcgggttcaggaccgctgatcggaagtgagaatcccagctgtgtgtcagggctggaaagggctcgggagtgcgcggggcaagtgaccgtgtgtgtaaagagtgaggcgtatgaggctgtgtcggggcagaggcacaacgtttcaatgatagggacttagggtgatagaagtgcaaagcatgactgtcaaatttttggagcaggttttctgacttcggtcggaaaacccctcctccggggatacaacgtgtttcctaaaagtagagggaggtaagagacggtagcacctgcggggcggcttgcacgccgagtgcctgtgacgcgccggcttaacttaactgcttccctgaagtaccttgaggttcctgatgtgcgggcggtagacggtaggcttatgcggcacgctgtcgtttccaccgtggctactgcgctttgggaaggccacgacctcctcctttggggaggtccttaggatctcagcttggcagtcgagtgggtggcgaccttttaaaggaatgggacccacccggagttc

SEQ ID NO: 373 - DNA, 1079 bp, synthetic construct
  source 1..1079: mol_type = other DNA
tttcttttgtaatccgaaacattctagtctgcgaattaaaagccattatttgaagaaggatgccccggctccatctggccaccgaaagattgctccttaacacaggctaaggaccagcttctttgggagagaacagacgcaggggcgggagggaaaaagggagaggcagacgtcacttcctcttggcgactctggcagcagattggtcggttgagtggcagaaaggcagacggggactgggcaaggcactgtcggtgacatcacggacagggcgacttctatgtagatgaggcagcgcagaggctgctgcttcgccacttgctgcttcgccacgaagggagttcccgtgccctgggagcgggttcaggaccgctgatcggaagtgagaatcccagctgtgtgtcagggctggaaagggctcgggagtgcgcggggcaagtgaccgtgtgtgtaaagagtgaggcgtatgaggctgtgtcggggcagaggcacaacgtttcaatgatagggacttagggtgatagaagtgcaaagcatgactgtcaaatttttggagcaggttttctgacttcggtcggaaaacccctttcccttcttgtaatacaaaataataacaaccacagaggacatcgcaagtaaaatgtgtataacaaccccatctaaagaaccctatcatctttctactatctgtctacctaaatatgtatagtataaataaccctatatagcactctaagcaacttaagttaggtaacttagaaaactcttttttttttttgagactgagtctcactctgtcgcacccaggctggagtgcagtggcgtgatctcggctcactgcaacctccaccttctgggttcaagtgattctcccatctcagtctcccaagtagctgggattacaggcacgccaccatgccctgctacatttttttttttttagtagagatgaggtttcaccacattggccaggctgttctcgaactcctgacctcaggtgatccgcccaccttggcctcatgaagtgctgggattacaggtgtgagccactgtacccagccagaaaactcttaaaaaac

SEQ ID NO: 374 - DNA, 969 bp, synthetic construct
  source 1..969: mol_type = other DNA
tttcttttgtaatccgaaacattctagtctgcgaattaaaagccattatttgaagaaggatgccccggctccatctggccaccgaaagattgctccttaacacaggctaaggaccagcttctttgggagagaacagacgcaggggcgggagggaaaaagggagaggcagacgtcacttcctcttggcgactctggcagcagattggtcggttgagtggcagaaaggcagacggggactgggcaaggcactgtcggtgacatcacggacagggcgacttctatgtagatgaggcagcgcagaggctgctgcttcgccacttgctgcttcgccacgaagggagttcccgtgccctgggagcgggttcaggaccgctgatcggaagtgagaatcccagctgtgtgtcagggctggaaagggctcgggagtgcgcggggcaagtgaccgtgtgtgtaaagagtgaggcgtatgaggctgtgtcggggcagaggcacaacgtttcaatgatagggacttagggtgatagaagtgcaaagcatgactgtcaaatttttggagcaggttttctgacttcggtcggaaaacccctctgaattttcttgcagttgaacaacagaggctttttttgtgtgtgtgggggtgcttggttttgggaggttgaagagtacttgttcgcaaactctctaaatgagagatggggaagtgtcttaccagctgattcgcgagagcacctgcaagtttacctgttttagtgatttgcgtttatgaaagttggagttgctgattttgtgatctctacttttaaggtaaaagcagggcggtgttgacttttcttgccagttggctgtcctgttttctttctcgcactgttttctttttgagacgaagtctgtcgctcaggctggagtgcactggcgtgatctcggctcgctgcaaactttgccgaacccctgtttagcgatttccgtttg

SEQ ID NO: 375 - DNA, 1087 bp, synthetic construct
  source 1..1087: mol_type = other DNA
tttcttttgtaatccgaaacattctagtctgcgaattaaaagccattatttgaagaaggatgccccggctccatctggccaccgaaagattgctccttaacacaggctaaggaccagcttctttgggagagaacagacgcaggggcgggagggaaaaagggagaggcagacgtcacttcctcttggcgactctggcagcagattggtcggttgagtggcagaaaggcagacggggactgggcaaggcactgtcggtgacatcacggacagggcgacttctatgtagatgaggcagcgcagaggctgctgcttcgccacttgctgcttcgccacgaagggagttcccgtgccctgggagcgggttcaggaccgctgatcggaagtgagaatcccagctgtgtgtcagggctggaaagggctcgggagtgcgcggggcaagtgaccgtgtgtgtaaagagtgaggcgtatgaggctgtgtcggggcagaggcacaacgtttcaatgatagggacttagggtgatagaagtgcaaagcatgactgtcaaatttttggagcaggttttctgacttcggtcggaaaacccctatatgtggtaatccaacaatagaaattatttttaagtttgtgtgttcctttttctgttcaatggtgcttttgatattgttgtaaagcagtgactagcagattctgtgtggtaaaagcactgaaccctgtttagttcttttctccctaccttattggtaattatttctgtgtatatatgttccaaagaaatgcggcttgtatattcatgcttttcaactttttgtgatagacagttgatacacaagtagtacctcctccgggatcttcttagtcaagactgtttggtagatgcatgttttttgttacttgtaatgtacagtattcagttcattttctttttgcagcactgtccggttgaaacacaacgcgaggatcgggcgtggtggctcacgcctgtaatcccagcactttgggaggccgaggcaggacaatcaagaccaatcctggtcatcaaggcaggagaatcaagaccatcgaggtcaggagatcaagaccatcct

SEQ ID NO: 376 - DNA, 1085 bp, synthetic construct
  source 1..1085: mol_type = other DNA
tttcttttgtaatccgaaacattctagtctgcgaattaaaagccattatttgaagaaggatgccccggctccatctggccaccgaaagattgctccttaacacaggctaaggaccagcttctttgggagagaacagacgcaggggcgggagggaaaaagggagaggcagacgtcacttcctcttggcgactctggcagcagattggtcggttgagtggcagaaaggcagacggggactgggcaaggcactgtcggtgacatcacggacagggcgacttctatgtagatgaggcagcgcagaggctgctgcttcgccacttgctgcttcgccacgaagggagttcccgtgccctgggagcgggttcaggaccgctgatcggaagtgagaatcccagctgtgtgtcagggctggaaagggctcgggagtgcgcggggcaagtgaccgtgtgtgtaaagagtgaggcgtatgaggctgtgtcggggcagaggcacaacgtttcaatgatagggacttagggtgatagaagtgcaaagcatgactgtcaaatttttggagcaggttttctgacttcggtcggaaaacccctacatcaggttgtttttctgtttttacatcaggttgtttttctgtttggttttttttttacaccacgtttatacgccggtgcacggtttaccactgaaaacacctttcatctacaggtgatatcttttaacacaaataaaatgtagtagtcctaggagacggaatagaaggaggtggggcctaggcagattcatctctgcggtgcattttgcctctggccctcgggccctagtttgcgatctttcccatcttgcctctgcttccctctgcacaatcctgagtattgcagtaccttacacttaaggaaatttcgtcttgccaaagttgatccatttcagctccgaaacataacaggaactagtgcaacgataaacgtatgaggaacttgcaataagagtgacagaatcctttgaatcaaaaaaaaaaaaagccaccacttaatgagtatctaccatatgtcaagggcttcaccaatatttcattgaaatattccagacca

SEQ ID NO: 377 - DNA, 1087 bp, synthetic construct
  source 1..1087: mol_type = other DNA
tttcttttgtaatccgaaacattctagtctgcgaattaaaagccattatttgaagaaggatgccccggctccatctggccaccgaaagattgctccttaacacaggctaaggaccagcttctttgggagagaacagacgcaggggcgggagggaaaaagggagaggcagacgtcacttcctcttggcgactctggcagcagattggtcggttgagtggcagaaaggcagacggggactgggcaaggcactgtcggtgacatcacggacagggcgacttctatgtagatgaggcagcgcagaggctgctgcttcgccacttgctgcttcgccacgaagggagttcccgtgccctgggagcgggttcaggaccgctgatcggaagtgagaatcccagctgtgtgtcagggctggaaagggctcgggagtgcgcggggcaagtgaccgtgtgtgtaaagagtgaggcgtatgaggctgtgtcggggcagaggcacaacgtttcaatgatagggacttagggtgatagaagtgcaaagcatgactgtcaaatttttggagcaggttttctgacttcggtcggaaaacccctcttatgatgtttgttgccaatgatagattgttttcactgtgcaaaaattatgggtagttttggtggtcttgatgcagttgtaagcttggggtatgaaggtttgggccacgcctgggcgcttccggctgcgccggatgctgtttcctttccgctcccaggggcgttgggaacggttgtaggacgtggctctttattcgtgagttttccatttacctccgctgaacctagagcttcagacgccctatggcgtccgcctcgacccaaccggcggccttgagcgctgagcaagcaaagggtgagaatcgtcctagtcaaggcataggctgctggcctggggtagtcaaggcatgggctgctggtctggggaggatgcgggcggaggatgtggggcgacaaacctggctacgtccgccgggaaaatggggtaggggacgccgggtaccgtccttctaagtggggcgcttgcccccaagacttgggatcttattgggttacctaca

SEQ ID NO: 378 - DNA, 1085 bp, synthetic construct
  source 1..1085: mol_type = other DNA
tttcttttgtaatccgaaacattctagtctgcgaattaaaagccattatttgaagaaggatgccccggctccatctggccaccgaaagattgctccttaacacaggctaaggaccagcttctttgggagagaacagacgcaggggcgggagggaaaaagggagaggcagacgtcacttcctcttggcgactctggcagcagattggtcggttgagtggcagaaaggcagacggggactgggcaaggcactgtcggtgacatcacggacagggcgacttctatgtagatgaggcagcgcagaggctgctgcttcgccacttgctgcttcgccacgaagggagttcccgtgccctgggagcgggttcaggaccgctgatcggaagtgagaatcccagctgtgtgtcagggctggaaagggctcgggagtgcgcggggcaagtgaccgtgtgtgtaaagagtgaggcgtatgaggctgtgtcggggcagaggcacaacgtttcaatgatagggacttagggtgatagaagtgcaaagcatgactgtcaaatttttggagcaggttttctgacttcggtcggaaaaccccttctttactgttatatgttaggcgaaatattacgcgtttggagtaagtggtgctttttgtaactgaaaagagattctgtgtgtgtttttttttttttagaggctgcatagttatttgtatgaaccgcaggtgacctaattagcaaggtaattcagacctgtatcctagcacttaagaagtggaagtgggataaccctgcgtgttctcgtgtgggaggctagcttaagcaacaaagcaggaaggccccaccaacaaaagaatttaaaaattatacgtgcgtggtggcgcgcgtatgaggaaattatttggcaactgtgttacagtatagcagcaaatggaatagacctagtccctgactttaggagacctgcctcagccccccgaatggctgggactacaggcgtgcgcctccgcgcccagctaatttttgcatttttggtagagacgggttcaccatgttggccaggatggtctccatctcttcatctggtgatccgcc

SEQ ID NO: 379 - DNA, 1087 bp, synthetic construct
  source 1..1087: mol_type = other DNA
tttcttttgtaatccgaaacattctagtctgcgaattaaaagccattatttgaagaaggatgccccggctccatctggccaccgaaagattgctccttaacacaggctaaggaccagcttctttgggagagaacagacgcaggggcgggagggaaaaagggagaggcagacgtcacttcctcttggcgactctggcagcagattggtcggttgagtggcagaaaggcagacggggactgggcaaggcactgtcggtgacatcacggacagggcgacttctatgtagatgaggcagcgcagaggctgctgcttcgccacttgctgcttcgccacgaagggagttcccgtgccctgggagcgggttcaggaccgctgatcggaagtgagaatcccagctgtgtgtcagggctggaaagggctcgggagtgcgcggggcaagtgaccgtgtgtgtaaagagtgaggcgtatgaggctgtgtcggggcagaggcacaacgtttcaatgatagggacttagggtgatagaagtgcaaagcatgactgtcaaatttttggagcaggttttctgacttcggtcggaaaacccctaccttattcacgcctaaaaagtagactgactgtggggtggtcgtgttttttgtttcttgttggtaggtggtgaatgcgtttttttcgttgttttctccgttactcaggctgccagttgcttggcagtcttgtcgctggctgtggacgctctgcacttcatcaccgtccccagctgcgctttgagccggtctaaggttgcccacagtattgacgttgggacccacgaaactggcaatttccatgtgtgcggccttacccagttctcccaaacttctgcgtataaccgcttctctgtgcttcagaaagataagtccggccccggcctcacacagcagctcagttcgtgacagcgtttaatatgtaaaatggagcaaataatttatagggcgttgggagagttaaagagactaattcatttacgtgttaaatacagggaatggcttttgcattgatataaccccagcctccagcatgcgccagacctgacgtaggtgttcggc

SEQ ID NO: 380 - DNA, 1087 bp, synthetic construct
  source 1..1087: mol_type = other DNA
tttcttttgtaatccgaaacattctagtctgcgaattaaaagccattatttgaagaaggatgccccggctccatctggccaccgaaagattgctccttaacacaggctaaggaccagcttctttgggagagaacagacgcaggggcgggagggaaaaagggagaggcagacgtcacttcctcttggcgactctggcagcagattggtcggttgagtggcagaaaggcagacggggactgggcaaggcactgtcggtgacatcacggacagggcgacttctatgtagatgaggcagcgcagaggctgctgcttcgccacttgctgcttcgccacgaagggagttcccgtgccctgggagcgggttcaggaccgctgatcggaagtgagaatcccagctgtgtgtcagggctggaaagggctcgggagtgcgcggggcaagtgaccgtgtgtgtaaagagtgaggcgtatgaggctgtgtcggggcagaggcacaacgtttcaatgatagggacttagggtgatagaagtgcaaagcatgactgtcaaatttttggagcaggttttctgacttcggtcggaaaaccccttttgacccattacccatctaagttagatgcttttttaaatgttttttaatttttaaatttttaatttttttcattatttattttttatttttgagacggatctcggctcactgtaacctccacctcccgggttcaagcgattctcctgactcagcctcccgagtagctgggattacaggcgcgcgccaccatgcccggctaatttttctatttttagtaaagacggggtttcgccatgttgaccagggtggtcttgaactcctgacgtcaggtgatcctcctgcctcgtgctgggattgcaggcgtgagccaccgctcccggcccttagatgctttttaatcagcaagtacgcaatgctttcctgacaggaatgtcaagtccgtcaggaaatccacataagggtgttaagcaggcaaagtaccacatacagattaaaatcaaaagcactgtcaacgcttatttaatttatacagtagaccctaacttttctaattttgtg

SEQ ID NO: 381 - DNA, 1087 bp, synthetic construct
  source 1..1087: mol_type = other DNA
tttcttttgtaatccgaaacattctagtctgcgaattaaaagccattatttgaagaaggatgccccggctccatctggccaccgaaagattgctccttaacacaggctaaggaccagcttctttgggagagaacagacgcaggggcgggagggaaaaagggagaggcagacgtcacttcctcttggcgactctggcagcagattggtcggttgagtggcagaaaggcagacggggactgggcaaggcactgtcggtgacatcacggacagggcgacttctatgtagatgaggcagcgcagaggctgctgcttcgccacttgctgcttcgccacgaagggagttcccgtgccctgggagcgggttcaggaccgctgatcggaagtgagaatcccagctgtgtgtcagggctggaaagggctcgggagtgcgcggggcaagtgaccgtgtgtgtaaagagtgaggcgtatgaggctgtgtcggggcagaggcacaacgtttcaatgatagggacttagggtgatagaagtgcaaagcatgactgtcaaatttttggagcaggttttctgacttcggtcggaaaacccctgtttacttggttttaaaaatagcttgcactagcgataccgcgaatatggttattaggtttgttaggcacagtcgtgtcttactatagaaaaataacgtagtgttcattttgctgcctgtatgtgttaatttgtccttattgcgccattgttcttgttaagtcttctgtaaggagttgcgggtttcaaactgtcagtctgagagcataagctcacttttcagtcagttgaattgaatgttacattcgattggttctggatattgatattacccaaggcttgtcctgtttgtaagtcttttcctacacctgacaatatgattatgtttacaatgtccctagaactctgggtgtatcgttcccactgaataaaatttgatctctaagttgacctataaatttaagtaccaaaaaactggtttgtaagattttggaaggcagaggcagggaagagaccaacgtggtctacatataaagtaccaggtacatataaagtaccaggt

SEQ ID NO: 382 - DNA, 1083 bp, synthetic construct
  source 1..1083: mol_type = other DNA
tttcttttgtaatccgaaacattctagtctgcgaattaaaagccattatttgaagaaggatgccccggctccatctggccaccgaaagattgctccttaacacaggctaaggaccagcttctttgggagagaacagacgcaggggcgggagggaaaaagggagaggcagacgtcacttcctcttggcgactctggcagcagattggtcggttgagtggcagaaaggcagacggggactgggcaaggcactgtcggtgacatcacggacagggcgacttctatgtagatgaggcagcgcagaggctgctgcttcgccacttgctgcttcgccacgaagggagttcccgtgccctgggagcgggttcaggaccgctgatcggaagtgagaatcccagctgtgtgtcagggctggaaagggctcgggagtgcgcggggcaagtgaccgtgtgtgtaaagagtgaggcgtatgaggctgtgtcggggcagaggcacaacgtttcaatgatagggacttagggtgatagaagtgcaaagcatgactgtcaaatttttggagcaggttttctgacttcggtcggaaaacccctatttttgtggtgctaaaagttagattgcattccgcccttctcacgtctctttacgtgttgtttgcgaggcgtggcctcggaggtaaatggtctccttttacctcagataagcttacctttgctctgtgagtaagaatgtagctacacttccaaatttagctattgtcctttgcggtccaaatgaaaatattaccttccgatctaacaatgttaaactagtcccaggcccttctatcgattgccagaatagactagactactacacagacacaccctctcaaatcaggccagctcctgcaacctgcacctacagtttgtcccctgggacaaatgaaaggacaggccctctttcccccccccccccaaatcagagcacacacagatcttggggtctggggcagaaatttcgttcatggaaaaaacaaacaaacaaacaaacacgatcaaaggaagctcgttccctttggcctcagggtttcttagacgccgtgttccc

SEQ ID NO: 383 - DNA, 1084 bp, synthetic construct
  source 1..1084: mol_type = other DNA
tttcttttgtaatccgaaacattctagtctgcgaattaaaagccattatttgaagaaggatgccccggctccatctggccaccgaaagattgctccttaacacaggctaaggaccagcttctttgggagagaacagacgcaggggcgggagggaaaaagggagaggcagacgtcacttcctcttggcgactctggcagcagattggtcggttgagtggcagaaaggcagacggggactgggcaaggcactgtcggtgacatcacggacagggcgacttctatgtagatgaggcagcgcagaggctgctgcttcgccacttgctgcttcgccacgaagggagttcccgtgccctgggagcgggttcaggaccgctgatcggaagtgagaatcccagctgtgtgtcagggctggaaagggctcgggagtgcgcggggcaagtgaccgtgtgtgtaaagagtgaggcgtatgaggctgtgtcggggcagaggcacaacgtttcaatgatagggacttagggtgatagaagtgcaaagcatgactgtcaaatttttggagcaggttttctgacttcggtcggaaaacccctataactggtaaccaaaagcagattactttcccccttgtggtcttcgcgtttgcggacgggagagaactttcggccattttccttttagaaatttaacttcttgaaggccaccaggtgacccttacttccctctcacctttccttctacctgtactttctctattaaaaagcctgcagaagtacccttgacaaattgccaaaaatgacacctaaaaaaaaaaaaaggaaaaacgacaccttaggtaattataggttgtaagaaaaagatttgacctcttggagtttttatttcttaataccaaaggacacccaaggaacgtatctctcaaaattgggtttcaaacctcagccgtttccttcttagttccagtgcttaacacgcaacagacctgcacaccactacactgcatacgagttttaaagttaataaatcagtcacccctccatagtcttctacctacttgaagacagaaacggctgctaggaagcaattcttc

SEQ ID NO: 384 - DNA, 1087 bp, synthetic construct
  source 1..1087: mol_type = other DNA
tttcttttgtaatccgaaacattctagtctgcgaattaaaagccattatttgaagaaggatgccccggctccatctggccaccgaaagattgctccttaacacaggctaaggaccagcttctttgggagagaacagacgcaggggcgggagggaaaaagggagaggcagacgtcacttcctcttggcgactctggcagcagattggtcggttgagtggcagaaaggcagacggggactgggcaaggcactgtcggtgacatcacggacagggcgacttctatgtagatgaggcagcgcagaggctgctgcttcgccacttgctgcttcgccacgaagggagttcccgtgccctgggagcgggttcaggaccgctgatcggaagtgagaatcccagctgtgtgtcagggctggaaagggctcgggagtgcgcggggcaagtgaccgtgtgtgtaaagagtgaggcgtatgaggctgtgtcggggcagaggcacaacgtttcaatgatagggacttagggtgatagaagtgcaaagcatgactgtcaaatttttggagcaggttttctgacttcggtcggaaaacccctctggggaataagagtggtttaaagaaagaacaatttgagagatctgcttagatctaataaaacccaagtatagtttctttagacgtcttatatctcacgtaggacctcttatttcagactcactgcaagaacaagctaaagaactatatacagtcaggaacaaggtgagccatcgcggttctcagtcccatgatcttaagagtttttcctcttcccctcttccctggctgtcctggagctcactctgtagaccaggctggtctcaaactcagaaatccacttacctctgcctcccaagggctgggattaaaggcatgcaccaccattgcccggcagggtatgtggactatgctgtccttcaactcagagatcgtggtactttaaatctcattttccgaaagaaaagaaaagaaaggaaggggggaaataaagccagtatattttgcacccacaatctgaagttctacaaatattgttagaaaatgcaaaggacccaagtc

SEQ ID NO: 385 - DNA, 1087 bp, synthetic construct
  source 1..1087: mol_type = other DNA
tttcttttgtaatccgaaacattctagtctgcgaattaaaagccattatttgaagaaggatgccccggctccatctggccaccgaaagattgctccttaacacaggctaaggaccagcttctttgggagagaacagacgcaggggcgggagggaaaaagggagaggcagacgtcacttcctcttggcgactctggcagcagattggtcggttgagtggcagaaaggcagacggggactgggcaaggcactgtcggtgacatcacggacagggcgacttctatgtagatgaggcagcgcagaggctgctgcttcgccacttgctgcttcgccacgaagggagttcccgtgccctgggagcgggttcaggaccgctgatcggaagtgagaatcccagctgtgtgtcagggctggaaagggctcgggagtgcgcggggcaagtgaccgtgtgtgtaaagagtgaggcgtatgaggctgtgtcggggcagaggcacaacgtttcaatgatagggacttagggtgatagaagtgcaaagcatgactgtcaaatttttggagcaggttttctgacttcggtcggaaaacccctctcggtttatcttaaagggttttaaatatagaaagcttccttagtcttatgggtgagagtgctgtttaagccttacctaggtatgtctttgaacatttattacagattgttatttgtgactatgaccactcaggtgttctgttcttgtgaatttagacacactcagaaaggctacacactcaaagaccacaccaaagtgaagtactatctgggccgtgaaactggtcacatatcagttattttgcagtaaaacaaggaagtcaatcatactgcttcagtgggtcagggagtcaagaatgcacagtacaagagctggtgagattcctcagcaggtaagagcactgaatgctcttccaaagattctgagttcaaatcccagcaaccacgtggtggatttgaacaaaggatgaaaacaaccatccataaccagatctgatgccctcttctggagtgtcaaaagacagctatggtgtacttacataaataaataagtaaaaaca

SEQ ID NO: 386 - DNA, 1087 bp, synthetic construct
  source 1..1087: mol_type = other DNA
tttcttttgtaatccgaaacattctagtctgcgaattaaaagccattatttgaagaaggatgccccggctccatctggccaccgaaagattgctccttaacacaggctaaggaccagcttctttgggagagaacagacgcaggggcgggagggaaaaagggagaggcagacgtcacttcctcttggcgactctggcagcagattggtcggttgagtggcagaaaggcagacggggactgggcaaggcactgtcggtgacatcacggacagggcgacttctatgtagatgaggcagcgcagaggctgctgcttcgccacttgctgcttcgccacgaagggagttcccgtgccctgggagcgggttcaggaccgctgatcggaagtgagaatcccagctgtgtgtcagggctggaaagggctcgggagtgcgcggggcaagtgaccgtgtgtgtaaagagtgaggcgtatgaggctgtgtcggggcagaggcacaacgtttcaatgatagggacttagggtgatagaagtgcaaagcatgactgtcaaatttttggagcaggttttctgacttcggtcggaaaacccctccacattttgtgtttaaaaatagaaatatttaagtgagatcagtttaaatctgctttatctagggtgtctaactgcttgcatctttttaacttttccttatttgtgagaaggtctgtaaaacttattatatgttagtacactgtagctgtcttcagacactccagaagagggattcagatcaccttacagatggttttgagccaccatgtggttgctgggatttgaactcaggacctttagaaaagtagttgggtgctcttacccgctgagccatctcaccagccctttttttttcttttttccagttcgggtttctctgtgtgtagccctggctgtcctggaactcattctgtagaccgggctggcctcgaactcagaaatctgcctgcctctgcctcccaagtgctgggattaaaggaatgtgccttcattgcccggctctagggctttttgttgttgtttgtttgtttgtttgtttgtttgcttttgtggatggcct

SEQ ID NO: 387 - DNA, 1087 bp, synthetic construct
  source 1..1087: mol_type = other DNA
tttcttttgtaatccgaaacattctagtctgcgaattaaaagccattatttgaagaaggatgccccggctccatctggccaccgaaagattgctccttaacacaggctaaggaccagcttctttgggagagaacagacgcaggggcgggagggaaaaagggagaggcagacgtcacttcctcttggcgactctggcagcagattggtcggttgagtggcagaaaggcagacggggactgggcaaggcactgtcggtgacatcacggacagggcgacttctatgtagatgaggcagcgcagaggctgctgcttcgccacttgctgcttcgccacgaagggagttcccgtgccctgggagcgggttcaggaccgctgatcggaagtgagaatcccagctgtgtgtcagggctggaaagggctcgggagtgcgcggggcaagtgaccgtgtgtgtaaagagtgaggcgtatgaggctgtgtcggggcagaggcacaacgtttcaatgatagggacttagggtgatagaagtgcaaagcatgactgtcaaatttttggagcaggttttctgacttcggtcggaaaacccctaaaaccagtaagggagaaaggtcaagtaacatataaaggaaggcctatcagaattacaccagacttttcaccagagactatgaaagccagaagagcctggacagatgttatacagacactaagagaacacaaatgccagcccaggctactatacctggccaaactctcaattaccatagatggagaaaccaaagtattccacgacaaaaacaaattcacacaatatctttccacgaatccagcccttcaaaggataatgacagaaaagaagcaatacaaggacggaaatcacgccctagaacaaccaagaaactaatcattcaacaaaccaaaaagaagacagccacaagaacagaatgccaactctaacaacaaaaataaaaggaagcaacaattacttttccttaatatctcttaatatcaatggactcaattccccaataaaaagacatagactaacagactggctacacaaacaggacccaacattctgctgctta

SEQ ID NO: 388 - DNA, 1087 bp, synthetic construct
  source 1..1087: mol_type = other DNA
tttcttttgtaatccgaaacattctagtctgcgaattaaaagccattatttgaagaaggatgccccggctccatctggccaccgaaagattgctccttaacacaggctaaggaccagcttctttgggagagaacagacgcaggggcgggagggaaaaagggagaggcagacgtcacttcctcttggcgactctggcagcagattggtcggttgagtggcagaaaggcagacggggactgggcaaggcactgtcggtgacatcacggacagggcgacttctatgtagatgaggcagcgcagaggctgctgcttcgccacttgctgcttcgccacgaagggagttcccgtgccctgggagcgggttcaggaccgctgatcggaagtgagaatcccagctgtgtgtcagggctggaaagggctcgggagtgcgcggggcaagtgaccgtgtgtgtaaagagtgaggcgtatgaggctgtgtcggggcagaggcacaacgtttcaatgatagggacttagggtgatagaagtgcaaagcatgactgtcaaatttttggagcaggttttctgacttcggtcggaaaacccctcccaatttcactggtctacaatgaaagcaaaacagttctcttccccgctccccggtgtgtgagaggggctttgatccttctctggtttcctaggaaacgcgtatgtgctagagccacgctctgagacttccgcctcgtgcggtcccgcttcctttctgcctcctctggcctgcatccgtgggggaggtggctggctgcagggttctccggatctcttctgtgttcccactactcaagcaccgagtggcgttctatggcgtccgcctcggctcagcccgcggccctgagcgcggagcaggccaagggtgaggaaagagcctagtctgggtgtgggccgtcttctggggggagggcgcgatactattctttgcctctccaagtggggcccttgcccattagggcgaagggttgggaggacaagcttatcgggttgcttgcaggcctcggcccactaattccctgcctcttccctcctctgggctcgcccgccgtcctccgcg

SEQ ID NO: 389 - DNA, 1087 bp, synthetic construct
  source 1..1087: mol_type = other DNA
tttcttttgtaatccgaaacattctagtctgcgaattaaaagccattatttgaagaaggatgccccggctccatctggccaccgaaagattgctccttaacacaggctaaggaccagcttctttgggagagaacagacgcaggggcgggagggaaaaagggagaggcagacgtcacttcctcttggcgactctggcagcagattggtcggttgagtggcagaaaggcagacggggactgggcaaggcactgtcggtgacatcacggacagggcgacttctatgtagatgaggcagcgcagaggctgctgcttcgccacttgctgcttcgccacgaagggagttcccgtgccctgggagcgggttcaggaccgctgatcggaagtgagaatcccagctgtgtgtcagggctggaaagggctcgggagtgcgcggggcaagtgaccgtgtgtgtaaagagtgaggcgtatgaggctgtgtcggggcagaggcacaacgtttcaatgatagggacttagggtgatagaagtgcaaagcatgactgtcaaatttttggagcaggttttctgacttcggtcggaaaacccctgaatttgttaaattacaggaggaagcttttttagttcattttacaaatactttcttgttaggtagataataccttctaaggttattatctggatcttctaagtctttttatcgctagcaagtctaagtttctggactttggaattagaagttaatgtcgtaggcgggcatggtggtccacgcctttaatcccagagtttgggaggcagacgcaggtggttttctgagttcgaggccatcctgctcttcaatgttagttccaggacagccagggttatacaaagaaaccctgtctcgagaaacaaaacaaacaaaaaaagagtagctgagtgctctgagttgtctctccagccccttagctatttattttcatttaaattatttttgttttattcgcttgtgtgcctgagtttgaatttcccgggattaacagttgaagactagggctggtgagatggctcagcggttaagattgccgactgctcttccaaaggtcctgag

SEQ ID NO: 390 - DNA, 1087 bp, synthetic construct
  source 1..1087: mol_type = other DNA
tttcttttgtaatccgaaacattctagtctgcgaattaaaagccattatttgaagaaggatgccccggctccatctggccaccgaaagattgctccttaacacaggctaaggaccagcttctttgggagagaacagacgcaggggcgggagggaaaaagggagaggcagacgtcacttcctcttggcgactctggcagcagattggtcggttgagtggcagaaaggcagacggggactgggcaaggcactgtcggtgacatcacggacagggcgacttctatgtagatgaggcagcgcagaggctgctgcttcgccacttgctgcttcgccacgaagggagttcccgtgccctgggagcgggttcaggaccgctgatcggaagtgagaatcccagctgtgtgtcagggctggaaagggctcgggagtgcgcggggcaagtgaccgtgtgtgtaaagagtgaggcgtatgaggctgtgtcggggcagaggcacaacgtttcaatgatagggacttagggtgatagaagtgcaaagcatgactgtcaaatttttggagcaggttttctgacttcggtcggaaaacccctaccccctaattctacaagaatagaaagcttagcagctcctctgaatggttgctctcaggtgctagtggttgcaagtcgtatgttgatgcctgcctttgccctacctggtgtgtgagcgtgagcgcgccccacctctccagcctctctcttactgtttttcagacaagatgggactgttgttctcctactgctatgtacctcaatttcaattgatcatgcctggacataactgcccatgttgtaaggtcgtctacgttgtaaggtcgtgctcagtttctgatgcctagactagtcacctttccgtttgcctcctgactgtgtaaatgaggcaaatgaaggtggtctcttaactgacatgttagtgtttgacctatgggatagtttctcattgttgagacagaatttctagaagctggtccgctgagcggctaagagcacttgctgatattgcaaaggatctacctgggtttggttctcagcactcacatggaagttcacat

SEQ ID NO: 391 - DNA, 654 bp, synthetic construct
  source 1..654: mol_type = other DNA
tttcttttgtaatccgaaacattctagtctgcgaattaaaagccattatttgaagaaggatgccccggctccatctggccaccgaaagattgctccttaacacaggctaaggaccagcttctttgggagagaacagacgcaggggcgggagggaaaaagggagaggcagacgtcacttcctcttggcgactctggcagcagattggtcggttgagtggcagaaaggcagacggggactgggcaaggcactgtcggtgacatcacggacagggcgacttctatgtagatgaggcagcgcagaggctgctgcttcgccacttgctgcttcgccacgaagggagttcccgtgccctgggagcgggttcaggaccgctgatcggaagtgagaatcccagctgtgtgtcagggctggaaagggctcgggagtgcgcggggcaagtgaccgtgtgtgtaaagagtgaggcgtatgaggctgtgtcggggcagaggcacaacgtttcaatgatagggacttagggtgatagaagtgcaaagcatgactgtcaaatttttggagcaggttttctgacttcggtcggaaaaccccttgtagttcctgcaatttaattttcgtttaaaactttattttattctttaacttaaaaaaaatatata

SEQ ID NO: 392 - DNA, 1087 bp, synthetic construct
  source 1..1087: mol_type = other DNA
gtttcttctgtaatccgaaacattctagtctgcgaattaaaagccattatttgaagaaggatgccccggctccatctggccaccgaaaggttgctccttaacacaggctaaggaccagcttttttgggagagaacagacgcaggggcgggagggaaaaagggagaggcagacgtcacttcctcttggcggctctggcagcagattggtcagttgagtggcagaaaagcagacggggactgggcaaggcactgtcggtgacatcacggacagggcgacttctatgtagatgaggcagcgcagaggctgctgcttcgccacttgctgcttcgccacgaaggagttcccctgccctgggagcgggttcaggaccgcggatcggaagagagaatcccagctgtgtgtcagggctggaaagggctcgggagtgcgcggggcaagtgaccgtgtgtgtaaagagtgaggcgtatgaggctgtgtcggggcagagcccgaagatctcaatgatagggacttagggtgatagaagtgcaaagcatgactgtcaaatttttggagcaggttttctgacttcggtcggaaaacccctactttctggagtttcaaaaacagactgtacgccaagggtcatatctttttttgtattggtttgtgtcttggttggtgtcttaggtgttaatcctacagtggagggtttatgggaataggaagtaacatgtcgcctgcatgtcataggagaaaaagcgagcatcagccgtatcggctttgtaacacaaattagctatcgtgaagtccgctcagctcttccctttctaccctggctgctttttgcagggattggtccgtggtctccagtctcttgggttctcaccctgtgtgaaaatcttcgtgtttttccctaccccccagtcacctcttacacagcctctgcttccaagcgcagcccccacaggagtttgtaggatttctgtgctagcggggaatgtgttctcacctcatagagccaggtagaaattatgcagatgggcagttctctgggaagaaagcagggcctttggggctctcagtgtccccgttgggttgtagaca

SEQ ID NO: 393 - DNA, 1087 bp, synthetic construct
  source 1..1087: mol_type = other DNA
gtttcttctgtaatccgaaacattctagtctgcgaattaaaagccattatttgaagaaggatgccccggctccatctggccaccgaaaggttgctccttaacacaggctaaggaccagcttttttgggagagaacagacgcaggggcgggagggaaaaagggagaggcagacgtcacttcctcttggcggctctggcagcagattggtcagttgagtggcagaaaagcagacggggactgggcaaggcactgtcggtgacatcacggacagggcgacttctatgtagatgaggcagcgcagaggctgctgcttcgccacttgctgcttcgccacgaaggagttcccctgccctgggagcgggttcaggaccgcggatcggaagagagaatcccagctgtgtgtcagggctggaaagggctcgggagtgcgcggggcaagtgaccgtgtgtgtaaagagtgaggcgtatgaggctgtgtcggggcagagcccgaagatctcaatgatagggacttagggtgatagaagtgcaaagcatgactgtcaaatttttggagcaggttttctgacttcggtcggaaaacccctactttctggagtttctaaaagtagactgtacgctaagggtcatatctttttttgttttggtttgtgtcttggttggcgtcttaaatgttaatcctacagtggagggctggcgaataggaagtaacatgtcgcctgcacgccataggagaaaaagcgagcatcagccgtatcggctttgtaacacaaattagctatcgtgaagtccgctcagctcttccctttctaccctggctgctttttgcagggattggtccgtggtctccagtctcttgggttctcaccctgtgtgaaaatcttcctgtttttccctaccccccaagtcacctcttacacagcctctgcttccaagcgcagcccccacaggagtttgtaggatttctgtgctagcggggagtgtgttctcacctcatagagccaggtagaaactacgcagatgggtgctgttctccaggaagaaagcagggcctttggggctctcagtgtccccgttgggttgtaga

SEQ ID NO: 394 - DNA, 1087 bp, synthetic construct
  source 1..1087: mol_type = other DNA
gtttcttctgtaatccgaaacattctagtctgcgaattaaaagccattatttgaagaaggatgccccggctccatctggccaccgaaaggttgctccttaacacaggctaaggaccagcttttttgggagagaacagacgcaggggcgggagggaaaaagggagaggcagacgtcacttcctcttggcggctctggcagcagattggtcagttgagtggcagaaaagcagacggggactgggcaaggcactgtcggtgacatcacggacagggcgacttctatgtagatgaggcagcgcagaggctgctgcttcgccacttgctgcttcgccacgaaggagttcccctgccctgggagcgggttcaggaccgcggatcggaagagagaatcccagctgtgtgtcagggctggaaagggctcgggagtgcgcggggcaagtgaccgtgtgtgtaaagagtgaggcgtatgaggctgtgtcggggcagagcccgaagatctcaatgatagggacttagggtgatagaagtgcaaagcatgactgtcaaatttttggagcaggttttctgacttcggtcggaaaacccctactttctggagtttcaaaaacagaccgtacgccaagggtcatgtcttttttcgtattggtttgtgtcttagttgttaatcctacagtggaggcctggggaataagaagtaacatgtggcctgcacgccataggagaaaaagcgagcatcagccgtatcggctttgtaacacaaattagctatcgtgaagtccgctcagctcttccatttctaccctggctgctttttgcagggattggtccgtggtctccagtctcttgggttctcaccctgtgtgaaaatcttcgtgtttttccctaccccccaagtcacctcttacacagcctctgcttccaagcgcagcccccacaggagtttgtaggatttctgtgctagcggggagtgtgttctcacctcatagagccaggtagaaattatgcagatgggcgctgttctctgggaagaaagcagggcctttggggctctcagtgtccccgttgggttgtagacataacactctta

SEQ ID NO: 395 - DNA, 891 bp, synthetic construct
  source 1..891: mol_type = other DNA
gtttcttctgtaatccgaaacattctagtctgcgaattaaaagccattatttgaagaaggatgccccggctccatctggccaccgaaaggttgctccttaacacaggctaaggaccagcttttttgggagagaacagacgcaggggcgggagggaaaaagggagaggcagacgtcacttcctcttggcggctctggcagcagattggtcagttgagtggcagaaaagcagacggggactgggcaaggcactgtcggtgacatcacggacagggcgacttctatgtagatgaggcagcgcagaggctgctgcttcgccacttgctgcttcgccacgaaggagttcccctgccctgggagcgggttcaggaccgcggatcggaagagagaatcccagctgtgtgtcagggctggaaagggctcgggagtgcgcggggcaagtgaccgtgtgtgtaaagagtgaggcgtatgaggctgtgtcggggcagagcccgaagatctcaatgatagggacttagggtgatagaagtgcaaagcatgactgtcaaatttttggagcaggttttctgacttcggtcggaaaacccctcctccggggatacaacgtgtttcctaaaagtagagggaggtaagagacggtagcacctgcggggcggcttgcacgccgagtgcctgtgacgcgccggcttaacttaactgcttccctgaagtaccttgaggttcctgatgtgcgggcggtagacggtaggcttatgcggcacgctgtcgtttccaccgtggctactgcgctttgggaaggccacgacctcctcctttggggaggtccttaggatctcagcttggcagtcgagtgggtggcgaccttttaaaggaatgggacccacccggagttc

SEQ ID NO: 396 - DNA, 1079 bp, synthetic construct
  source 1..1079: mol_type = other DNA
gtttcttctgtaatccgaaacattctagtctgcgaattaaaagccattatttgaagaaggatgccccggctccatctggccaccgaaaggttgctccttaacacaggctaaggaccagcttttttgggagagaacagacgcaggggcgggagggaaaaagggagaggcagacgtcacttcctcttggcggctctggcagcagattggtcagttgagtggcagaaaagcagacggggactgggcaaggcactgtcggtgacatcacggacagggcgacttctatgtagatgaggcagcgcagaggctgctgcttcgccacttgctgcttcgccacgaaggagttcccctgccctgggagcgggttcaggaccgcggatcggaagagagaatcccagctgtgtgtcagggctggaaagggctcgggagtgcgcggggcaagtgaccgtgtgtgtaaagagtgaggcgtatgaggctgtgtcggggcagagcccgaagatctcaatgatagggacttagggtgatagaagtgcaaagcatgactgtcaaatttttggagcaggttttctgacttcggtcggaaaacccctttcccttcttgtaatacaaaataataacaaccacagaggacatcgcaagtaaaatgtgtataacaaccccatctaaagaaccctatcatctttctactatctgtctacctaaatatgtatagtataaataaccctatatagcactctaagcaacttaagttaggtaacttagaaaactcttttttttttttgagactgagtctcactctgtcgcacccaggctggagtgcagtggcgtgatctcggctcactgcaacctccaccttctgggttcaagtgattctcccatctcagtctcccaagtagctgggattacaggcacgccaccatgccctgctacatttttttttttttagtagagatgaggtttcaccacattggccaggctgttctcgaactcctgacctcaggtgatccgcccaccttggcctcatgaagtgctgggattacaggtgtgagccactgtacccagccagaaaactcttaaaaaac

SEQ ID NO: 397 - DNA, 969 bp, synthetic construct
  source 1..969: mol_type = other DNA
gtttcttctgtaatccgaaacattctagtctgcgaattaaaagccattatttgaagaaggatgccccggctccatctggccaccgaaaggttgctccttaacacaggctaaggaccagcttttttgggagagaacagacgcaggggcgggagggaaaaagggagaggcagacgtcacttcctcttggcggctctggcagcagattggtcagttgagtggcagaaaagcagacggggactgggcaaggcactgtcggtgacatcacggacagggcgacttctatgtagatgaggcagcgcagaggctgctgcttcgccacttgctgcttcgccacgaaggagttcccctgccctgggagcgggttcaggaccgcggatcggaagagagaatcccagctgtgtgtcagggctggaaagggctcgggagtgcgcggggcaagtgaccgtgtgtgtaaagagtgaggcgtatgaggctgtgtcggggcagagcccgaagatctcaatgatagggacttagggtgatagaagtgcaaagcatgactgtcaaatttttggagcaggttttctgacttcggtcggaaaacccctctgaattttcttgcagttgaacaacagaggctttttttgtgtgtgtgggggtgcttggttttgggaggttgaagagtacttgttcgcaaactctctaaatgagagatggggaagtgtcttaccagctgattcgcgagagcacctgcaagtttacctgttttagtgatttgcgtttatgaaagttggagttgctgattttgtgatctctacttttaaggtaaaagcagggcggtgttgacttttcttgccagttggctgtcctgttttctttctcgcactgttttctttttgagacgaagtctgtcgctcaggctggagtgcactggcgtgatctcggctcgctgcaaactttgccgaacccctgtttagcgatttccgtttg

SEQ ID NO: 398 - DNA, 1087 bp, synthetic construct
  source 1..1087: mol_type = other DNA
gtttcttctgtaatccgaaacattctagtctgcgaattaaaagccattatttgaagaaggatgccccggctccatctggccaccgaaaggttgctccttaacacaggctaaggaccagcttttttgggagagaacagacgcaggggcgggagggaaaaagggagaggcagacgtcacttcctcttggcggctctggcagcagattggtcagttgagtggcagaaaagcagacggggactgggcaaggcactgtcggtgacatcacggacagggcgacttctatgtagatgaggcagcgcagaggctgctgcttcgccacttgctgcttcgccacgaaggagttcccctgccctgggagcgggttcaggaccgcggatcggaagagagaatcccagctgtgtgtcagggctggaaagggctcgggagtgcgcggggcaagtgaccgtgtgtgtaaagagtgaggcgtatgaggctgtgtcggggcagagcccgaagatctcaatgatagggacttagggtgatagaagtgcaaagcatgactgtcaaatttttggagcaggttttctgacttcggtcggaaaacccctatatgtggtaatccaacaatagaaattatttttaagtttgtgtgttcctttttctgttcaatggtgcttttgatattgttgtaaagcagtgactagcagattctgtgtggtaaaagcactgaaccctgtttagttcttttctccctaccttattggtaattatttctgtgtatatatgttccaaagaaatgcggcttgtatattcatgcttttcaactttttgtgatagacagttgatacacaagtagtacctcctccgggatcttcttagtcaagactgtttggtagatgcatgttttttgttacttgtaatgtacagtattcagttcattttctttttgcagcactgtccggttgaaacacaacgcgaggatcgggcgtggtggctcacgcctgtaatcccagcactttgggaggccgaggcaggacaatcaagaccaatcctggtcatcaaggcaggagaatcaagaccatcgaggtcaggagatcaagaccatcct

SEQ ID NO: 399 - DNA, 1085 bp, synthetic construct
  source 1..1085: mol_type = other DNA
gtttcttctgtaatccgaaacattctagtctgcgaattaaaagccattatttgaagaaggatgccccggctccatctggccaccgaaaggttgctccttaacacaggctaaggaccagcttttttgggagagaacagacgcaggggcgggagggaaaaagggagaggcagacgtcacttcctcttggcggctctggcagcagattggtcagttgagtggcagaaaagcagacggggactgggcaaggcactgtcggtgacatcacggacagggcgacttctatgtagatgaggcagcgcagaggctgctgcttcgccacttgctgcttcgccacgaaggagttcccctgccctgggagcgggttcaggaccgcggatcggaagagagaatcccagctgtgtgtcagggctggaaagggctcgggagtgcgcggggcaagtgaccgtgtgtgtaaagagtgaggcgtatgaggctgtgtcggggcagagcccgaagatctcaatgatagggacttagggtgatagaagtgcaaagcatgactgtcaaatttttggagcaggttttctgacttcggtcggaaaacccctacatcaggttgtttttctgtttttacatcaggttgtttttctgtttggttttttttttacaccacgtttatacgccggtgcacggtttaccactgaaaacacctttcatctacaggtgatatcttttaacacaaataaaatgtagtagtcctaggagacggaatagaaggaggtggggcctaggcagattcatctctgcggtgcattttgcctctggccctcgggccctagtttgcgatctttcccatcttgcctctgcttccctctgcacaatcctgagtattgcagtaccttacacttaaggaaatttcgtcttgccaaagttgatccatttcagctccgaaacataacaggaactagtgcaacgataaacgtatgaggaacttgcaataagagtgacagaatcctttgaatcaaaaaaaaaaaaagccaccacttaatgagtatctaccatatgtcaagggcttcaccaatatttcattgaaatattccagacca

SEQ ID NO: 400 - DNA, 1087 bp, synthetic construct
  source 1..1087: mol_type = other DNA
gtttcttctgtaatccgaaacattctagtctgcgaattaaaagccattatttgaagaaggatgccccggctccatctggccaccgaaaggttgctccttaacacaggctaaggaccagcttttttgggagagaacagacgcaggggcgggagggaaaaagggagaggcagacgtcacttcctcttggcggctctggcagcagattggtcagttgagtggcagaaaagcagacggggactgggcaaggcactgtcggtgacatcacggacagggcgacttctatgtagatgaggcagcgcagaggctgctgcttcgccacttgctgcttcgccacgaaggagttcccctgccctgggagcgggttcaggaccgcggatcggaagagagaatcccagctgtgtgtcagggctggaaagggctcgggagtgcgcggggcaagtgaccgtgtgtgtaaagagtgaggcgtatgaggctgtgtcggggcagagcccgaagatctcaatgatagggacttagggtgatagaagtgcaaagcatgactgtcaaatttttggagcaggttttctgacttcggtcggaaaacccctcttatgatgtttgttgccaatgatagattgttttcactgtgcaaaaattatgggtagttttggtggtcttgatgcagttgtaagcttggggtatgaaggtttgggccacgcctgggcgcttccggctgcgccggatgctgtttcctttccgctcccaggggcgttgggaacggttgtaggacgtggctctttattcgtgagttttccatttacctccgctgaacctagagcttcagacgccctatggcgtccgcctcgacccaaccggcggccttgagcgctgagcaagcaaagggtgagaatcgtcctagtcaaggcataggctgctggcctggggtagtcaaggcatgggctgctggtctggggaggatgcgggcggaggatgtggggcgacaaacctggctacgtccgccgggaaaatggggtaggggacgccgggtaccgtccttctaagtggggcgcttgcccccaagacttgggatcttattgggttacctaca

SEQ ID NO: 401 - DNA, 1085 bp, synthetic construct
  source 1..1085: mol_type = other DNA
gtttcttctgtaatccgaaacattctagtctgcgaattaaaagccattatttgaagaaggatgccccggctccatctggccaccgaaaggttgctccttaacacaggctaaggaccagcttttttgggagagaacagacgcaggggcgggagggaaaaagggagaggcagacgtcacttcctcttggcggctctggcagcagattggtcagttgagtggcagaaaagcagacggggactgggcaaggcactgtcggtgacatcacggacagggcgacttctatgtagatgaggcagcgcagaggctgctgcttcgccacttgctgcttcgccacgaaggagttcccctgccctgggagcgggttcaggaccgcggatcggaagagagaatcccagctgtgtgtcagggctggaaagggctcgggagtgcgcggggcaagtgaccgtgtgtgtaaagagtgaggcgtatgaggctgtgtcggggcagagcccgaagatctcaatgatagggacttagggtgatagaagtgcaaagcatgactgtcaaatttttggagcaggttttctgacttcggtcggaaaaccccttctttactgttatatgttaggcgaaatattacgcgtttggagtaagtggtgctttttgtaactgaaaagagattctgtgtgtgtttttttttttttagaggctgcatagttatttgtatgaaccgcaggtgacctaattagcaaggtaattcagacctgtatcctagcacttaagaagtggaagtgggataaccctgcgtgttctcgtgtgggaggctagcttaagcaacaaagcaggaaggccccaccaacaaaagaatttaaaaattatacgtgcgtggtggcgcgcgtatgaggaaattatttggcaactgtgttacagtatagcagcaaatggaatagacctagtccctgactttaggagacctgcctcagccccccgaatggctgggactacaggcgtgcgcctccgcgcccagctaatttttgcatttttggtagagacgggttcaccatgttggccaggatggtctccatctcttcatctggtgatccgcc

SEQ ID NO: 402 - DNA, 1087 bp, synthetic construct
  source 1..1087: mol_type = other DNA
gtttcttctgtaatccgaaacattctagtctgcgaattaaaagccattatttgaagaaggatgccccggctccatctggccaccgaaaggttgctccttaacacaggctaaggaccagcttttttgggagagaacagacgcaggggcgggagggaaaaagggagaggcagacgtcacttcctcttggcggctctggcagcagattggtcagttgagtggcagaaaagcagacggggactgggcaaggcactgtcggtgacatcacggacagggcgacttctatgtagatgaggcagcgcagaggctgctgcttcgccacttgctgcttcgccacgaaggagttcccctgccctgggagcgggttcaggaccgcggatcggaagagagaatcccagctgtgtgtcagggctggaaagggctcgggagtgcgcggggcaagtgaccgtgtgtgtaaagagtgaggcgtatgaggctgtgtcggggcagagcccgaagatctcaatgatagggacttagggtgatagaagtgcaaagcatgactgtcaaatttttggagcaggttttctgacttcggtcggaaaacccctaccttattcacgcctaaaaagtagactgactgtggggtggtcgtgttttttgtttcttgttggtaggtggtgaatgcgtttttttcgttgttttctccgttactcaggctgccagttgcttggcagtcttgtcgctggctgtggacgctctgcacttcatcaccgtccccagctgcgctttgagccggtctaaggttgcccacagtattgacgttgggacccacgaaactggcaatttccatgtgtgcggccttacccagttctcccaaacttctgcgtataaccgcttctctgtgcttcagaaagataagtccggccccggcctcacacagcagctcagttcgtgacagcgtttaatatgtaaaatggagcaaataatttatagggcgttgggagagttaaagagactaattcatttacgtgttaaatacagggaatggcttttgcattgatataaccccagcctccagcatgcgccagacctgacgtaggtgttcggc

SEQ ID NO: 403 - DNA, 1087 bp, synthetic construct
  source 1..1087: mol_type = other DNA
gtttcttctgtaatccgaaacattctagtctgcgaattaaaagccattatttgaagaaggatgccccggctccatctggccaccgaaaggttgctccttaacacaggctaaggaccagcttttttgggagagaacagacgcaggggcgggagggaaaaagggagaggcagacgtcacttcctcttggcggctctggcagcagattggtcagttgagtggcagaaaagcagacggggactgggcaaggcactgtcggtgacatcacggacagggcgacttctatgtagatgaggcagcgcagaggctgctgcttcgccacttgctgcttcgccacgaaggagttcccctgccctgggagcgggttcaggaccgcggatcggaagagagaatcccagctgtgtgtcagggctggaaagggctcgggagtgcgcggggcaagtgaccgtgtgtgtaaagagtgaggcgtatgaggctgtgtcggggcagagcccgaagatctcaatgatagggacttagggtgatagaagtgcaaagcatgactgtcaaatttttggagcaggttttctgacttcggtcggaaaaccccttttgacccattacccatctaagttagatgcttttttaaatgttttttaatttttaaatttttaatttttttcattatttattttttatttttgagacggatctcggctcactgtaacctccacctcccgggttcaagcgattctcctgactcagcctcccgagtagctgggattacaggcgcgcgccaccatgcccggctaatttttctatttttagtaaagacggggtttcgccatgttgaccagggtggtcttgaactcctgacgtcaggtgatcctcctgcctcgtgctgggattgcaggcgtgagccaccgctcccggcccttagatgctttttaatcagcaagtacgcaatgctttcctgacaggaatgtcaagtccgtcaggaaatccacataagggtgttaagcaggcaaagtaccacatacagattaaaatcaaaagcactgtcaacgcttatttaatttatacagtagaccctaacttttctaattttgtg

SEQ ID NO: 404 - DNA, 1087 bp, synthetic construct
  source 1..1087: mol_type = other DNA
gtttcttctgtaatccgaaacattctagtctgcgaattaaaagccattatttgaagaaggatgccccggctccatctggccaccgaaaggttgctccttaacacaggctaaggaccagcttttttgggagagaacagacgcaggggcgggagggaaaaagggagaggcagacgtcacttcctcttggcggctctggcagcagattggtcagttgagtggcagaaaagcagacggggactgggcaaggcactgtcggtgacatcacggacagggcgacttctatgtagatgaggcagcgcagaggctgctgcttcgccacttgctgcttcgccacgaaggagttcccctgccctgggagcgggttcaggaccgcggatcggaagagagaatcccagctgtgtgtcagggctggaaagggctcgggagtgcgcggggcaagtgaccgtgtgtgtaaagagtgaggcgtatgaggctgtgtcggggcagagcccgaagatctcaatgatagggacttagggtgatagaagtgcaaagcatgactgtcaaatttttggagcaggttttctgacttcggtcggaaaacccctgtttacttggttttaaaaatagcttgcactagcgataccgcgaatatggttattaggtttgttaggcacagtcgtgtcttactatagaaaaataacgtagtgttcattttgctgcctgtatgtgttaatttgtccttattgcgccattgttcttgttaagtcttctgtaaggagttgcgggtttcaaactgtcagtctgagagcataagctcacttttcagtcagttgaattgaatgttacattcgattggttctggatattgatattacccaaggcttgtcctgtttgtaagtcttttcctacacctgacaatatgattatgtttacaatgtccctagaactctgggtgtatcgttcccactgaataaaatttgatctctaagttgacctataaatttaagtaccaaaaaactggtttgtaagattttggaaggcagaggcagggaagagaccaacgtggtctacatataaagtaccaggtacatataaagtaccaggt

SEQ ID NO: 405 - DNA, 1083 bp, synthetic construct
  source 1..1083: mol_type = other DNA
gtttcttctgtaatccgaaacattctagtctgcgaattaaaagccattatttgaagaaggatgccccggctccatctggccaccgaaaggttgctccttaacacaggctaaggaccagcttttttgggagagaacagacgcaggggcgggagggaaaaagggagaggcagacgtcacttcctcttggcggctctggcagcagattggtcagttgagtggcagaaaagcagacggggactgggcaaggcactgtcggtgacatcacggacagggcgacttctatgtagatgaggcagcgcagaggctgctgcttcgccacttgctgcttcgccacgaaggagttcccctgccctgggagcgggttcaggaccgcggatcggaagagagaatcccagctgtgtgtcagggctggaaagggctcgggagtgcgcggggcaagtgaccgtgtgtgtaaagagtgaggcgtatgaggctgtgtcggggcagagcccgaagatctcaatgatagggacttagggtgatagaagtgcaaagcatgactgtcaaatttttggagcaggttttctgacttcggtcggaaaacccctatttttgtggtgctaaaagttagattgcattccgcccttctcacgtctctttacgtgttgtttgcgaggcgtggcctcggaggtaaatggtctccttttacctcagataagcttacctttgctctgtgagtaagaatgtagctacacttccaaatttagctattgtcctttgcggtccaaatgaaaatattaccttccgatctaacaatgttaaactagtcccaggcccttctatcgattgccagaatagactagactactacacagacacaccctctcaaatcaggccagctcctgcaacctgcacctacagtttgtcccctgggacaaatgaaaggacaggccctctttcccccccccccccaaatcagagcacacacagatcttggggtctggggcagaaatttcgttcatggaaaaaacaaacaaacaaacaaacacgatcaaaggaagctcgttccctttggcctcagggtttcttagacgccgtgttccc

SEQ ID NO: 406 - DNA, 1084 bp, synthetic construct
  source 1..1084: mol_type = other DNA
gtttcttctgtaatccgaaacattctagtctgcgaattaaaagccattatttgaagaaggatgccccggctccatctggccaccgaaaggttgctccttaacacaggctaaggaccagcttttttgggagagaacagacgcaggggcgggagggaaaaagggagaggcagacgtcacttcctcttggcggctctggcagcagattggtcagttgagtggcagaaaagcagacggggactgggcaaggcactgtcggtgacatcacggacagggcgacttctatgtagatgaggcagcgcagaggctgctgcttcgccacttgctgcttcgccacgaaggagttcccctgccctgggagcgggttcaggaccgcggatcggaagagagaatcccagctgtgtgtcagggctggaaagggctcgggagtgcgcggggcaagtgaccgtgtgtgtaaagagtgaggcgtatgaggctgtgtcggggcagagcccgaagatctcaatgatagggacttagggtgatagaagtgcaaagcatgactgtcaaatttttggagcaggttttctgacttcggtcggaaaacccctataactggtaaccaaaagcagattactttcccccttgtggtcttcgcgtttgcggacgggagagaactttcggccattttccttttagaaatttaacttcttgaaggccaccaggtgacccttacttccctctcacctttccttctacctgtactttctctattaaaaagcctgcagaagtacccttgacaaattgccaaaaatgacacctaaaaaaaaaaaaaggaaaaacgacaccttaggtaattataggttgtaagaaaaagatttgacctcttggagtttttatttcttaataccaaaggacacccaaggaacgtatctctcaaaattgggtttcaaacctcagccgtttccttcttagttccagtgcttaacacgcaacagacctgcacaccactacactgcatacgagttttaaagttaataaatcagtcacccctccatagtcttctacctacttgaagacagaaacggctgctaggaagcaattcttc

SEQ ID NO: 407 - DNA, 1087 bp, synthetic construct
  source 1..1087: mol_type = other DNA
gtttcttctgtaatccgaaacattctagtctgcgaattaaaagccattatttgaagaaggatgccccggctccatctggccaccgaaaggttgctccttaacacaggctaaggaccagcttttttgggagagaacagacgcaggggcgggagggaaaaagggagaggcagacgtcacttcctcttggcggctctggcagcagattggtcagttgagtggcagaaaagcagacggggactgggcaaggcactgtcggtgacatcacggacagggcgacttctatgtagatgaggcagcgcagaggctgctgcttcgccacttgctgcttcgccacgaaggagttcccctgccctgggagcgggttcaggaccgcggatcggaagagagaatcccagctgtgtgtcagggctggaaagggctcgggagtgcgcggggcaagtgaccgtgtgtgtaaagagtgaggcgtatgaggctgtgtcggggcagagcccgaagatctcaatgatagggacttagggtgatagaagtgcaaagcatgactgtcaaatttttggagcaggttttctgacttcggtcggaaaacccctctggggaataagagtggtttaaagaaagaacaatttgagagatctgcttagatctaataaaacccaagtatagtttctttagacgtcttatatctcacgtaggacctcttatttcagactcactgcaagaacaagctaaagaactatatacagtcaggaacaaggtgagccatcgcggttctcagtcccatgatcttaagagtttttcctcttcccctcttccctggctgtcctggagctcactctgtagaccaggctggtctcaaactcagaaatccacttacctctgcctcccaagggctgggattaaaggcatgcaccaccattgcccggcagggtatgtggactatgctgtccttcaactcagagatcgtggtactttaaatctcattttccgaaagaaaagaaaagaaaggaaggggggaaataaagccagtatattttgcacccacaatctgaagttctacaaatattgttagaaaatgcaaaggacccaagtc

SEQ ID NO: 408 - DNA, 1087 bp, synthetic construct
  source 1..1087: mol_type = other DNA
gtttcttctgtaatccgaaacattctagtctgcgaattaaaagccattatttgaagaaggatgccccggctccatctggccaccgaaaggttgctccttaacacaggctaaggaccagcttttttgggagagaacagacgcaggggcgggagggaaaaagggagaggcagacgtcacttcctcttggcggctctggcagcagattggtcagttgagtggcagaaaagcagacggggactgggcaaggcactgtcggtgacatcacggacagggcgacttctatgtagatgaggcagcgcagaggctgctgcttcgccacttgctgcttcgccacgaaggagttcccctgccctgggagcgggttcaggaccgcggatcggaagagagaatcccagctgtgtgtcagggctggaaagggctcgggagtgcgcggggcaagtgaccgtgtgtgtaaagagtgaggcgtatgaggctgtgtcggggcagagcccgaagatctcaatgatagggacttagggtgatagaagtgcaaagcatgactgtcaaatttttggagcaggttttctgacttcggtcggaaaacccctctcggtttatcttaaagggttttaaatatagaaagcttccttagtcttatgggtgagagtgctgtttaagccttacctaggtatgtctttgaacatttattacagattgttatttgtgactatgaccactcaggtgttctgttcttgtgaatttagacacactcagaaaggctacacactcaaagaccacaccaaagtgaagtactatctgggccgtgaaactggtcacatatcagttattttgcagtaaaacaaggaagtcaatcatactgcttcagtgggtcagggagtcaagaatgcacagtacaagagctggtgagattcctcagcaggtaagagcactgaatgctcttccaaagattctgagttcaaatcccagcaaccacgtggtggatttgaacaaaggatgaaaacaaccatccataaccagatctgatgccctcttctggagtgtcaaaagacagctatggtgtacttacataaataaataagtaaaaaca

SEQ ID NO: 409 - DNA, 1087 bp, synthetic construct
  source 1..1087: mol_type = other DNA
gtttcttctgtaatccgaaacattctagtctgcgaattaaaagccattatttgaagaaggatgccccggctccatctggccaccgaaaggttgctccttaacacaggctaaggaccagcttttttgggagagaacagacgcaggggcgggagggaaaaagggagaggcagacgtcacttcctcttggcggctctggcagcagattggtcagttgagtggcagaaaagcagacggggactgggcaaggcactgtcggtgacatcacggacagggcgacttctatgtagatgaggcagcgcagaggctgctgcttcgccacttgctgcttcgccacgaaggagttcccctgccctgggagcgggttcaggaccgcggatcggaagagagaatcccagctgtgtgtcagggctggaaagggctcgggagtgcgcggggcaagtgaccgtgtgtgtaaagagtgaggcgtatgaggctgtgtcggggcagagcccgaagatctcaatgatagggacttagggtgatagaagtgcaaagcatgactgtcaaatttttggagcaggttttctgacttcggtcggaaaacccctccacattttgtgtttaaaaatagaaatatttaagtgagatcagtttaaatctgctttatctagggtgtctaactgcttgcatctttttaacttttccttatttgtgagaaggtctgtaaaacttattatatgttagtacactgtagctgtcttcagacactccagaagagggattcagatcaccttacagatggttttgagccaccatgtggttgctgggatttgaactcaggacctttagaaaagtagttgggtgctcttacccgctgagccatctcaccagccctttttttttcttttttccagttcgggtttctctgtgtgtagccctggctgtcctggaactcattctgtagaccgggctggcctcgaactcagaaatctgcctgcctctgcctcccaagtgctgggattaaaggaatgtgccttcattgcccggctctagggctttttgttgttgtttgtttgtttgtttgtttgtttgcttttgtggatggcct

SEQ ID NO: 410 - DNA, 1087 bp, synthetic construct
  source 1..1087: mol_type = other DNA
gtttcttctgtaatccgaaacattctagtctgcgaattaaaagccattatttgaagaaggatgccccggctccatctggccaccgaaaggttgctccttaacacaggctaaggaccagcttttttgggagagaacagacgcaggggcgggagggaaaaagggagaggcagacgtcacttcctcttggcggctctggcagcagattggtcagttgagtggcagaaaagcagacggggactgggcaaggcactgtcggtgacatcacggacagggcgacttctatgtagatgaggcagcgcagaggctgctgcttcgccacttgctgcttcgccacgaaggagttcccctgccctgggagcgggttcaggaccgcggatcggaagagagaatcccagctgtgtgtcagggctggaaagggctcgggagtgcgcggggcaagtgaccgtgtgtgtaaagagtgaggcgtatgaggctgtgtcggggcagagcccgaagatctcaatgatagggacttagggtgatagaagtgcaaagcatgactgtcaaatttttggagcaggttttctgacttcggtcggaaaacccctaaaaccagtaagggagaaaggtcaagtaacatataaaggaaggcctatcagaattacaccagacttttcaccagagactatgaaagccagaagagcctggacagatgttatacagacactaagagaacacaaatgccagcccaggctactatacctggccaaactctcaattaccatagatggagaaaccaaagtattccacgacaaaaacaaattcacacaatatctttccacgaatccagcccttcaaaggataatgacagaaaagaagcaatacaaggacggaaatcacgccctagaacaaccaagaaactaatcattcaacaaaccaaaaagaagacagccacaagaacagaatgccaactctaacaacaaaaataaaaggaagcaacaattacttttccttaatatctcttaatatcaatggactcaattccccaataaaaagacatagactaacagactggctacacaaacaggacccaacattctgctgctta

SEQ ID NO: 411 - DNA, 1087 bp, synthetic construct
  source 1..1087: mol_type = other DNA
gtttcttctgtaatccgaaacattctagtctgcgaattaaaagccattatttgaagaaggatgccccggctccatctggccaccgaaaggttgctccttaacacaggctaaggaccagcttttttgggagagaacagacgcaggggcgggagggaaaaagggagaggcagacgtcacttcctcttggcggctctggcagcagattggtcagttgagtggcagaaaagcagacggggactgggcaaggcactgtcggtgacatcacggacagggcgacttctatgtagatgaggcagcgcagaggctgctgcttcgccacttgctgcttcgccacgaaggagttcccctgccctgggagcgggttcaggaccgcggatcggaagagagaatcccagctgtgtgtcagggctggaaagggctcgggagtgcgcggggcaagtgaccgtgtgtgtaaagagtgaggcgtatgaggctgtgtcggggcagagcccgaagatctcaatgatagggacttagggtgatagaagtgcaaagcatgactgtcaaatttttggagcaggttttctgacttcggtcggaaaacccctcccaatttcactggtctacaatgaaagcaaaacagttctcttccccgctccccggtgtgtgagaggggctttgatccttctctggtttcctaggaaacgcgtatgtgctagagccacgctctgagacttccgcctcgtgcggtcccgcttcctttctgcctcctctggcctgcatccgtgggggaggtggctggctgcagggttctccggatctcttctgtgttcccactactcaagcaccgagtggcgttctatggcgtccgcctcggctcagcccgcggccctgagcgcggagcaggccaagggtgaggaaagagcctagtctgggtgtgggccgtcttctggggggagggcgcgatactattctttgcctctccaagtggggcccttgcccattagggcgaagggttgggaggacaagcttatcgggttgcttgcaggcctcggcccactaattccctgcctcttccctcctctgggctcgcccgccgtcctccgcg

SEQ ID NO: 412 - DNA, 1087 bp, synthetic construct
  source 1..1087: mol_type = other DNA
gtttcttctgtaatccgaaacattctagtctgcgaattaaaagccattatttgaagaaggatgccccggctccatctggccaccgaaaggttgctccttaacacaggctaaggaccagcttttttgggagagaacagacgcaggggcgggagggaaaaagggagaggcagacgtcacttcctcttggcggctctggcagcagattggtcagttgagtggcagaaaagcagacggggactgggcaaggcactgtcggtgacatcacggacagggcgacttctatgtagatgaggcagcgcagaggctgctgcttcgccacttgctgcttcgccacgaaggagttcccctgccctgggagcgggttcaggaccgcggatcggaagagagaatcccagctgtgtgtcagggctggaaagggctcgggagtgcgcggggcaagtgaccgtgtgtgtaaagagtgaggcgtatgaggctgtgtcggggcagagcccgaagatctcaatgatagggacttagggtgatagaagtgcaaagcatgactgtcaaatttttggagcaggttttctgacttcggtcggaaaacccctgaatttgttaaattacaggaggaagcttttttagttcattttacaaatactttcttgttaggtagataataccttctaaggttattatctggatcttctaagtctttttatcgctagcaagtctaagtttctggactttggaattagaagttaatgtcgtaggcgggcatggtggtccacgcctttaatcccagagtttgggaggcagacgcaggtggttttctgagttcgaggccatcctgctcttcaatgttagttccaggacagccagggttatacaaagaaaccctgtctcgagaaacaaaacaaacaaaaaaagagtagctgagtgctctgagttgtctctccagccccttagctatttattttcatttaaattatttttgttttattcgcttgtgtgcctgagtttgaatttcccgggattaacagttgaagactagggctggtgagatggctcagcggttaagattgccgactgctcttccaaaggtcctgag

SEQ ID NO: 413 - DNA, 1087 bp, synthetic construct
  source 1..1087: mol_type = other DNA
gtttcttctgtaatccgaaacattctagtctgcgaattaaaagccattatttgaagaaggatgccccggctccatctggccaccgaaaggttgctccttaacacaggctaaggaccagcttttttgggagagaacagacgcaggggcgggagggaaaaagggagaggcagacgtcacttcctcttggcggctctggcagcagattggtcagttgagtggcagaaaagcagacggggactgggcaaggcactgtcggtgacatcacggacagggcgacttctatgtagatgaggcagcgcagaggctgctgcttcgccacttgctgcttcgccacgaaggagttcccctgccctgggagcgggttcaggaccgcggatcggaagagagaatcccagctgtgtgtcagggctggaaagggctcgggagtgcgcggggcaagtgaccgtgtgtgtaaagagtgaggcgtatgaggctgtgtcggggcagagcccgaagatctcaatgatagggacttagggtgatagaagtgcaaagcatgactgtcaaatttttggagcaggttttctgacttcggtcggaaaacccctaccccctaattctacaagaatagaaagcttagcagctcctctgaatggttgctctcaggtgctagtggttgcaagtcgtatgttgatgcctgcctttgccctacctggtgtgtgagcgtgagcgcgccccacctctccagcctctctcttactgtttttcagacaagatgggactgttgttctcctactgctatgtacctcaatttcaattgatcatgcctggacataactgcccatgttgtaaggtcgtctacgttgtaaggtcgtgctcagtttctgatgcctagactagtcacctttccgtttgcctcctgactgtgtaaatgaggcaaatgaaggtggtctcttaactgacatgttagtgtttgacctatgggatagtttctcattgttgagacagaatttctagaagctggtccgctgagcggctaagagcacttgctgatattgcaaaggatctacctgggtttggttctcagcactcacatggaagttcacat

SEQ ID NO: 414 - DNA, 654 bp, synthetic construct
  source 1..654: mol_type = other DNA
gtttcttctgtaatccgaaacattctagtctgcgaattaaaagccattatttgaagaaggatgccccggctccatctggccaccgaaaggttgctccttaacacaggctaaggaccagcttttttgggagagaacagacgcaggggcgggagggaaaaagggagaggcagacgtcacttcctcttggcggctctggcagcagattggtcagttgagtggcagaaaagcagacggggactgggcaaggcactgtcggtgacatcacggacagggcgacttctatgtagatgaggcagcgcagaggctgctgcttcgccacttgctgcttcgccacgaaggagttcccctgccctgggagcgggttcaggaccgcggatcggaagagagaatcccagctgtgtgtcagggctggaaagggctcgggagtgcgcggggcaagtgaccgtgtgtgtaaagagtgaggcgtatgaggctgtgtcggggcagagcccgaagatctcaatgatagggacttagggtgatagaagtgcaaagcatgactgtcaaatttttggagcaggttttctgacttcggtcggaaaaccccttgtagttcctgcaatttaattttcgtttaaaactttattttattctttaacttaaaaaaaatatata

SEQ ID NO: 415 - DNA, 1087 bp, synthetic construct
  source 1..1087: mol_type = other DNA
gtttcttttgtaatccgaaacattctagtctgcgaattaaaagccattatttgaagaaggatgccccggctccatctggccaccgaaaggttgctccttaacacaggctaaggaccagcttctttgggagagaacagacgcaggggcgggagggaaaaagggagaggcagacgtcacttccccttggcggctctggcagcagattggtcggttgagtggcagaaaggcagacggggactgggcaaggcactgtcggtgacatcacggacagggcgacttctatgtagatgaggcagcgcagaggctgctgcttcgccacttgctgcttcgccacgaaggagttcccgtgccctgggagcgggttcaggaccgcggatcggaagtgagaatcccagctgtgtgtcagggctggaaagggctcgggagtgcgcggggcaagtgaccgtgtgtgtaaagagtgaggcgtatgaggctgtgtcggggcagagcccgaagatctcaatgatagggacttagggtgatagaagtgcaaagcatgactgtcaaatttttggagcaggttttctgacttcggtcggaaaacccctactttctggagtttcaaaaacagactgtacgccaagggtcatatctttttttgtattggtttgtgtcttggttggtgtcttaggtgttaatcctacagtggagggtttatgggaataggaagtaacatgtcgcctgcatgtcataggagaaaaagcgagcatcagccgtatcggctttgtaacacaaattagctatcgtgaagtccgctcagctcttccctttctaccctggctgctttttgcagggattggtccgtggtctccagtctcttgggttctcaccctgtgtgaaaatcttcgtgtttttccctaccccccagtcacctcttacacagcctctgcttccaagcgcagcccccacaggagtttgtaggatttctgtgctagcggggaatgtgttctcacctcatagagccaggtagaaattatgcagatgggcagttctctgggaagaaagcagggcctttggggctctcagtgtccccgttgggttgtagaca

SEQ ID NO: 416 - DNA, 1087 bp, synthetic construct
  source 1..1087: mol_type = other DNA
gtttcttttgtaatccgaaacattctagtctgcgaattaaaagccattatttgaagaaggatgccccggctccatctggccaccgaaaggttgctccttaacacaggctaaggaccagcttctttgggagagaacagacgcaggggcgggagggaaaaagggagaggcagacgtcacttccccttggcggctctggcagcagattggtcggttgagtggcagaaaggcagacggggactgggcaaggcactgtcggtgacatcacggacagggcgacttctatgtagatgaggcagcgcagaggctgctgcttcgccacttgctgcttcgccacgaaggagttcccgtgccctgggagcgggttcaggaccgcggatcggaagtgagaatcccagctgtgtgtcagggctggaaagggctcgggagtgcgcggggcaagtgaccgtgtgtgtaaagagtgaggcgtatgaggctgtgtcggggcagagcccgaagatctcaatgatagggacttagggtgatagaagtgcaaagcatgactgtcaaatttttggagcaggttttctgacttcggtcggaaaacccctactttctggagtttctaaaagtagactgtacgctaagggtcatatctttttttgttttggtttgtgtcttggttggcgtcttaaatgttaatcctacagtggagggctggcgaataggaagtaacatgtcgcctgcacgccataggagaaaaagcgagcatcagccgtatcggctttgtaacacaaattagctatcgtgaagtccgctcagctcttccctttctaccctggctgctttttgcagggattggtccgtggtctccagtctcttgggttctcaccctgtgtgaaaatcttcctgtttttccctaccccccaagtcacctcttacacagcctctgcttccaagcgcagcccccacaggagtttgtaggatttctgtgctagcggggagtgtgttctcacctcatagagccaggtagaaactacgcagatgggtgctgttctccaggaagaaagcagggcctttggggctctcagtgtccccgttgggttgtaga

SEQ ID NO: 417 - DNA, 1087 bp, synthetic construct
  source 1..1087: mol_type = other DNA
gtttcttttgtaatccgaaacattctagtctgcgaattaaaagccattatttgaagaaggatgccccggctccatctggccaccgaaaggttgctccttaacacaggctaaggaccagcttctttgggagagaacagacgcaggggcgggagggaaaaagggagaggcagacgtcacttccccttggcggctctggcagcagattggtcggttgagtggcagaaaggcagacggggactgggcaaggcactgtcggtgacatcacggacagggcgacttctatgtagatgaggcagcgcagaggctgctgcttcgccacttgctgcttcgccacgaaggagttcccgtgccctgggagcgggttcaggaccgcggatcggaagtgagaatcccagctgtgtgtcagggctggaaagggctcgggagtgcgcggggcaagtgaccgtgtgtgtaaagagtgaggcgtatgaggctgtgtcggggcagagcccgaagatctcaatgatagggacttagggtgatagaagtgcaaagcatgactgtcaaatttttggagcaggttttctgacttcggtcggaaaacccctactttctggagtttcaaaaacagaccgtacgccaagggtcatgtcttttttcgtattggtttgtgtcttagttgttaatcctacagtggaggcctggggaataagaagtaacatgtggcctgcacgccataggagaaaaagcgagcatcagccgtatcggctttgtaacacaaattagctatcgtgaagtccgctcagctcttccatttctaccctggctgctttttgcagggattggtccgtggtctccagtctcttgggttctcaccctgtgtgaaaatcttcgtgtttttccctaccccccaagtcacctcttacacagcctctgcttccaagcgcagcccccacaggagtttgtaggatttctgtgctagcggggagtgtgttctcacctcatagagccaggtagaaattatgcagatgggcgctgttctctgggaagaaagcagggcctttggggctctcagtgtccccgttgggttgtagacataacactctta

SEQ ID NO: 418 - DNA, 891 bp, synthetic construct
  source 1..891: mol_type = other DNA
gtttcttttgtaatccgaaacattctagtctgcgaattaaaagccattatttgaagaaggatgccccggctccatctggccaccgaaaggttgctccttaacacaggctaaggaccagcttctttgggagagaacagacgcaggggcgggagggaaaaagggagaggcagacgtcacttccccttggcggctctggcagcagattggtcggttgagtggcagaaaggcagacggggactgggcaaggcactgtcggtgacatcacggacagggcgacttctatgtagatgaggcagcgcagaggctgctgcttcgccacttgctgcttcgccacgaaggagttcccgtgccctgggagcgggttcaggaccgcggatcggaagtgagaatcccagctgtgtgtcagggctggaaagggctcgggagtgcgcggggcaagtgaccgtgtgtgtaaagagtgaggcgtatgaggctgtgtcggggcagagcccgaagatctcaatgatagggacttagggtgatagaagtgcaaagcatgactgtcaaatttttggagcaggttttctgacttcggtcggaaaacccctcctccggggatacaacgtgtttcctaaaagtagagggaggtaagagacggtagcacctgcggggcggcttgcacgccgagtgcctgtgacgcgccggcttaacttaactgcttccctgaagtaccttgaggttcctgatgtgcgggcggtagacggtaggcttatgcggcacgctgtcgtttccaccgtggctactgcgctttgggaaggccacgacctcctcctttggggaggtccttaggatctcagcttggcagtcgagtgggtggcgaccttttaaaggaatgggacccacccggagttc

SEQ ID NO: 419 - DNA, 1079 bp, synthetic construct
  source 1..1079: mol_type = other DNA
gtttcttttgtaatccgaaacattctagtctgcgaattaaaagccattatttgaagaaggatgccccggctccatctggccaccgaaaggttgctccttaacacaggctaaggaccagcttctttgggagagaacagacgcaggggcgggagggaaaaagggagaggcagacgtcacttccccttggcggctctggcagcagattggtcggttgagtggcagaaaggcagacggggactgggcaaggcactgtcggtgacatcacggacagggcgacttctatgtagatgaggcagcgcagaggctgctgcttcgccacttgctgcttcgccacgaaggagttcccgtgccctgggagcgggttcaggaccgcggatcggaagtgagaatcccagctgtgtgtcagggctggaaagggctcgggagtgcgcggggcaagtgaccgtgtgtgtaaagagtgaggcgtatgaggctgtgtcggggcagagcccgaagatctcaatgatagggacttagggtgatagaagtgcaaagcatgactgtcaaatttttggagcaggttttctgacttcggtcggaaaacccctttcccttcttgtaatacaaaataataacaaccacagaggacatcgcaagtaaaatgtgtataacaaccccatctaaagaaccctatcatctttctactatctgtctacctaaatatgtatagtataaataaccctatatagcactctaagcaacttaagttaggtaacttagaaaactcttttttttttttgagactgagtctcactctgtcgcacccaggctggagtgcagtggcgtgatctcggctcactgcaacctccaccttctgggttcaagtgattctcccatctcagtctcccaagtagctgggattacaggcacgccaccatgccctgctacatttttttttttttagtagagatgaggtttcaccacattggccaggctgttctcgaactcctgacctcaggtgatccgcccaccttggcctcatgaagtgctgggattacaggtgtgagccactgtacccagccagaaaactcttaaaaaac

SEQ ID NO: 420 - DNA, 969 bp, synthetic construct
  source 1..969: mol_type = other DNA
gtttcttttgtaatccgaaacattctagtctgcgaattaaaagccattatttgaagaaggatgccccggctccatctggccaccgaaaggttgctccttaacacaggctaaggaccagcttctttgggagagaacagacgcaggggcgggagggaaaaagggagaggcagacgtcacttccccttggcggctctggcagcagattggtcggttgagtggcagaaaggcagacggggactgggcaaggcactgtcggtgacatcacggacagggcgacttctatgtagatgaggcagcgcagaggctgctgcttcgccacttgctgcttcgccacgaaggagttcccgtgccctgggagcgggttcaggaccgcggatcggaagtgagaatcccagctgtgtgtcagggctggaaagggctcgggagtgcgcggggcaagtgaccgtgtgtgtaaagagtgaggcgtatgaggctgtgtcggggcagagcccgaagatctcaatgatagggacttagggtgatagaagtgcaaagcatgactgtcaaatttttggagcaggttttctgacttcggtcggaaaacccctctgaattttcttgcagttgaacaacagaggctttttttgtgtgtgtgggggtgcttggttttgggaggttgaagagtacttgttcgcaaactctctaaatgagagatggggaagtgtcttaccagctgattcgcgagagcacctgcaagtttacctgttttagtgatttgcgtttatgaaagttggagttgctgattttgtgatctctacttttaaggtaaaagcagggcggtgttgacttttcttgccagttggctgtcctgttttctttctcgcactgttttctttttgagacgaagtctgtcgctcaggctggagtgcactggcgtgatctcggctcgctgcaaactttgccgaacccctgtttagcgatttccgtttg

SEQ ID NO: 421 - DNA, 1087 bp, synthetic construct
  source 1..1087: mol_type = other DNA
gtttcttttgtaatccgaaacattctagtctgcgaattaaaagccattatttgaagaaggatgccccggctccatctggccaccgaaaggttgctccttaacacaggctaaggaccagcttctttgggagagaacagacgcaggggcgggagggaaaaagggagaggcagacgtcacttccccttggcggctctggcagcagattggtcggttgagtggcagaaaggcagacggggactgggcaaggcactgtcggtgacatcacggacagggcgacttctatgtagatgaggcagcgcagaggctgctgcttcgccacttgctgcttcgccacgaaggagttcccgtgccctgggagcgggttcaggaccgcggatcggaagtgagaatcccagctgtgtgtcagggctggaaagggctcgggagtgcgcggggcaagtgaccgtgtgtgtaaagagtgaggcgtatgaggctgtgtcggggcagagcccgaagatctcaatgatagggacttagggtgatagaagtgcaaagcatgactgtcaaatttttggagcaggttttctgacttcggtcggaaaacccctatatgtggtaatccaacaatagaaattatttttaagtttgtgtgttcctttttctgttcaatggtgcttttgatattgttgtaaagcagtgactagcagattctgtgtggtaaaagcactgaaccctgtttagttcttttctccctaccttattggtaattatttctgtgtatatatgttccaaagaaatgcggcttgtatattcatgcttttcaactttttgtgatagacagttgatacacaagtagtacctcctccgggatcttcttagtcaagactgtttggtagatgcatgttttttgttacttgtaatgtacagtattcagttcattttctttttgcagcactgtccggttgaaacacaacgcgaggatcgggcgtggtggctcacgcctgtaatcccagcactttgggaggccgaggcaggacaatcaagaccaatcctggtcatcaaggcaggagaatcaagaccatcgaggtcaggagatcaagaccatcct

SEQ ID NO: 422 - DNA, 1085 bp, synthetic construct
  source 1..1085: mol_type = other DNA
gtttcttttgtaatccgaaacattctagtctgcgaattaaaagccattatttgaagaaggatgccccggctccatctggccaccgaaaggttgctccttaacacaggctaaggaccagcttctttgggagagaacagacgcaggggcgggagggaaaaagggagaggcagacgtcacttccccttggcggctctggcagcagattggtcggttgagtggcagaaaggcagacggggactgggcaaggcactgtcggtgacatcacggacagggcgacttctatgtagatgaggcagcgcagaggctgctgcttcgccacttgctgcttcgccacgaaggagttcccgtgccctgggagcgggttcaggaccgcggatcggaagtgagaatcccagctgtgtgtcagggctggaaagggctcgggagtgcgcggggcaagtgaccgtgtgtgtaaagagtgaggcgtatgaggctgtgtcggggcagagcccgaagatctcaatgatagggacttagggtgatagaagtgcaaagcatgactgtcaaatttttggagcaggttttctgacttcggtcggaaaacccctacatcaggttgtttttctgtttttacatcaggttgtttttctgtttggttttttttttacaccacgtttatacgccggtgcacggtttaccactgaaaacacctttcatctacaggtgatatcttttaacacaaataaaatgtagtagtcctaggagacggaatagaaggaggtggggcctaggcagattcatctctgcggtgcattttgcctctggccctcgggccctagtttgcgatctttcccatcttgcctctgcttccctctgcacaatcctgagtattgcagtaccttacacttaaggaaatttcgtcttgccaaagttgatccatttcagctccgaaacataacaggaactagtgcaacgataaacgtatgaggaacttgcaataagagtgacagaatcctttgaatcaaaaaaaaaaaaagccaccacttaatgagtatctaccatatgtcaagggcttcaccaatatttcattgaaatattccagacca

SEQ ID NO: 423 - DNA, 1087 bp, synthetic construct
  source 1..1087: mol_type = other DNA
gtttcttttgtaatccgaaacattctagtctgcgaattaaaagccattatttgaagaaggatgccccggctccatctggccaccgaaaggttgctccttaacacaggctaaggaccagcttctttgggagagaacagacgcaggggcgggagggaaaaagggagaggcagacgtcacttccccttggcggctctggcagcagattggtcggttgagtggcagaaaggcagacggggactgggcaaggcactgtcggtgacatcacggacagggcgacttctatgtagatgaggcagcgcagaggctgctgcttcgccacttgctgcttcgccacgaaggagttcccgtgccctgggagcgggttcaggaccgcggatcggaagtgagaatcccagctgtgtgtcagggctggaaagggctcgggagtgcgcggggcaagtgaccgtgtgtgtaaagagtgaggcgtatgaggctgtgtcggggcagagcccgaagatctcaatgatagggacttagggtgatagaagtgcaaagcatgactgtcaaatttttggagcaggttttctgacttcggtcggaaaacccctcttatgatgtttgttgccaatgatagattgttttcactgtgcaaaaattatgggtagttttggtggtcttgatgcagttgtaagcttggggtatgaaggtttgggccacgcctgggcgcttccggctgcgccggatgctgtttcctttccgctcccaggggcgttgggaacggttgtaggacgtggctctttattcgtgagttttccatttacctccgctgaacctagagcttcagacgccctatggcgtccgcctcgacccaaccggcggccttgagcgctgagcaagcaaagggtgagaatcgtcctagtcaaggcataggctgctggcctggggtagtcaaggcatgggctgctggtctggggaggatgcgggcggaggatgtggggcgacaaacctggctacgtccgccgggaaaatggggtaggggacgccgggtaccgtccttctaagtggggcgcttgcccccaagacttgggatcttattgggttacctaca

SEQ ID NO: 424 - DNA, 1085 bp, synthetic construct
  source 1..1085: mol_type = other DNA
gtttcttttgtaatccgaaacattctagtctgcgaattaaaagccattatttgaagaaggatgccccggctccatctggccaccgaaaggttgctccttaacacaggctaaggaccagcttctttgggagagaacagacgcaggggcgggagggaaaaagggagaggcagacgtcacttccccttggcggctctggcagcagattggtcggttgagtggcagaaaggcagacggggactgggcaaggcactgtcggtgacatcacggacagggcgacttctatgtagatgaggcagcgcagaggctgctgcttcgccacttgctgcttcgccacgaaggagttcccgtgccctgggagcgggttcaggaccgcggatcggaagtgagaatcccagctgtgtgtcagggctggaaagggctcgggagtgcgcggggcaagtgaccgtgtgtgtaaagagtgaggcgtatgaggctgtgtcggggcagagcccgaagatctcaatgatagggacttagggtgatagaagtgcaaagcatgactgtcaaatttttggagcaggttttctgacttcggtcggaaaaccccttctttactgttatatgttaggcgaaatattacgcgtttggagtaagtggtgctttttgtaactgaaaagagattctgtgtgtgtttttttttttttagaggctgcatagttatttgtatgaaccgcaggtgacctaattagcaaggtaattcagacctgtatcctagcacttaagaagtggaagtgggataaccctgcgtgttctcgtgtgggaggctagcttaagcaacaaagcaggaaggccccaccaacaaaagaatttaaaaattatacgtgcgtggtggcgcgcgtatgaggaaattatttggcaactgtgttacagtatagcagcaaatggaatagacctagtccctgactttaggagacctgcctcagccccccgaatggctgggactacaggcgtgcgcctccgcgcccagctaatttttgcatttttggtagagacgggttcaccatgttggccaggatggtctccatctcttcatctggtgatccgcc

SEQ ID NO: 425 - DNA, 1087 bp, synthetic construct
  source 1..1087: mol_type = other DNA
gtttcttttgtaatccgaaacattctagtctgcgaattaaaagccattatttgaagaaggatgccccggctccatctggccaccgaaaggttgctccttaacacaggctaaggaccagcttctttgggagagaacagacgcaggggcgggagggaaaaagggagaggcagacgtcacttccccttggcggctctggcagcagattggtcggttgagtggcagaaaggcagacggggactgggcaaggcactgtcggtgacatcacggacagggcgacttctatgtagatgaggcagcgcagaggctgctgcttcgccacttgctgcttcgccacgaaggagttcccgtgccctgggagcgggttcaggaccgcggatcggaagtgagaatcccagctgtgtgtcagggctggaaagggctcgggagtgcgcggggcaagtgaccgtgtgtgtaaagagtgaggcgtatgaggctgtgtcggggcagagcccgaagatctcaatgatagggacttagggtgatagaagtgcaaagcatgactgtcaaatttttggagcaggttttctgacttcggtcggaaaacccctaccttattcacgcctaaaaagtagactgactgtggggtggtcgtgttttttgtttcttgttggtaggtggtgaatgcgtttttttcgttgttttctccgttactcaggctgccagttgcttggcagtcttgtcgctggctgtggacgctctgcacttcatcaccgtccccagctgcgctttgagccggtctaaggttgcccacagtattgacgttgggacccacgaaactggcaatttccatgtgtgcggccttacccagttctcccaaacttctgcgtataaccgcttctctgtgcttcagaaagataagtccggccccggcctcacacagcagctcagttcgtgacagcgtttaatatgtaaaatggagcaaataatttatagggcgttgggagagttaaagagactaattcatttacgtgttaaatacagggaatggcttttgcattgatataaccccagcctccagcatgcgccagacctgacgtaggtgttcggc

SEQ ID NO: 426 - DNA, 1087 bp, synthetic construct
  source 1..1087: mol_type = other DNA
gtttcttttgtaatccgaaacattctagtctgcgaattaaaagccattatttgaagaaggatgccccggctccatctggccaccgaaaggttgctccttaacacaggctaaggaccagcttctttgggagagaacagacgcaggggcgggagggaaaaagggagaggcagacgtcacttccccttggcggctctggcagcagattggtcggttgagtggcagaaaggcagacggggactgggcaaggcactgtcggtgacatcacggacagggcgacttctatgtagatgaggcagcgcagaggctgctgcttcgccacttgctgcttcgccacgaaggagttcccgtgccctgggagcgggttcaggaccgcggatcggaagtgagaatcccagctgtgtgtcagggctggaaagggctcgggagtgcgcggggcaagtgaccgtgtgtgtaaagagtgaggcgtatgaggctgtgtcggggcagagcccgaagatctcaatgatagggacttagggtgatagaagtgcaaagcatgactgtcaaatttttggagcaggttttctgacttcggtcggaaaaccccttttgacccattacccatctaagttagatgcttttttaaatgttttttaatttttaaatttttaatttttttcattatttattttttatttttgagacggatctcggctcactgtaacctccacctcccgggttcaagcgattctcctgactcagcctcccgagtagctgggattacaggcgcgcgccaccatgcccggctaatttttctatttttagtaaagacggggtttcgccatgttgaccagggtggtcttgaactcctgacgtcaggtgatcctcctgcctcgtgctgggattgcaggcgtgagccaccgctcccggcccttagatgctttttaatcagcaagtacgcaatgctttcctgacaggaatgtcaagtccgtcaggaaatccacataagggtgttaagcaggcaaagtaccacatacagattaaaatcaaaagcactgtcaacgcttatttaatttatacagtagaccctaacttttctaattttgtg

SEQ ID NO: 427 - DNA, 1087 bp, synthetic construct
  source 1..1087: mol_type = other DNA
gtttcttttgtaatccgaaacattctagtctgcgaattaaaagccattatttgaagaaggatgccccggctccatctggccaccgaaaggttgctccttaacacaggctaaggaccagcttctttgggagagaacagacgcaggggcgggagggaaaaagggagaggcagacgtcacttccccttggcggctctggcagcagattggtcggttgagtggcagaaaggcagacggggactgggcaaggcactgtcggtgacatcacggacagggcgacttctatgtagatgaggcagcgcagaggctgctgcttcgccacttgctgcttcgccacgaaggagttcccgtgccctgggagcgggttcaggaccgcggatcggaagtgagaatcccagctgtgtgtcagggctggaaagggctcgggagtgcgcggggcaagtgaccgtgtgtgtaaagagtgaggcgtatgaggctgtgtcggggcagagcccgaagatctcaatgatagggacttagggtgatagaagtgcaaagcatgactgtcaaatttttggagcaggttttctgacttcggtcggaaaacccctgtttacttggttttaaaaatagcttgcactagcgataccgcgaatatggttattaggtttgttaggcacagtcgtgtcttactatagaaaaataacgtagtgttcattttgctgcctgtatgtgttaatttgtccttattgcgccattgttcttgttaagtcttctgtaaggagttgcgggtttcaaactgtcagtctgagagcataagctcacttttcagtcagttgaattgaatgttacattcgattggttctggatattgatattacccaaggcttgtcctgtttgtaagtcttttcctacacctgacaatatgattatgtttacaatgtccctagaactctgggtgtatcgttcccactgaataaaatttgatctctaagttgacctataaatttaagtaccaaaaaactggtttgtaagattttggaaggcagaggcagggaagagaccaacgtggtctacatataaagtaccaggtacatataaagtaccaggt

SEQ ID NO: 428 - DNA, 1083 bp, synthetic construct
  source 1..1083: mol_type = other DNA
gtttcttttgtaatccgaaacattctagtctgcgaattaaaagccattatttgaagaaggatgccccggctccatctggccaccgaaaggttgctccttaacacaggctaaggaccagcttctttgggagagaacagacgcaggggcgggagggaaaaagggagaggcagacgtcacttccccttggcggctctggcagcagattggtcggttgagtggcagaaaggcagacggggactgggcaaggcactgtcggtgacatcacggacagggcgacttctatgtagatgaggcagcgcagaggctgctgcttcgccacttgctgcttcgccacgaaggagttcccgtgccctgggagcgggttcaggaccgcggatcggaagtgagaatcccagctgtgtgtcagggctggaaagggctcgggagtgcgcggggcaagtgaccgtgtgtgtaaagagtgaggcgtatgaggctgtgtcggggcagagcccgaagatctcaatgatagggacttagggtgatagaagtgcaaagcatgactgtcaaatttttggagcaggttttctgacttcggtcggaaaacccctatttttgtggtgctaaaagttagattgcattccgcccttctcacgtctctttacgtgttgtttgcgaggcgtggcctcggaggtaaatggtctccttttacctcagataagcttacctttgctctgtgagtaagaatgtagctacacttccaaatttagctattgtcctttgcggtccaaatgaaaatattaccttccgatctaacaatgttaaactagtcccaggcccttctatcgattgccagaatagactagactactacacagacacaccctctcaaatcaggccagctcctgcaacctgcacctacagtttgtcccctgggacaaatgaaaggacaggccctctttcccccccccccccaaatcagagcacacacagatcttggggtctggggcagaaatttcgttcatggaaaaaacaaacaaacaaacaaacacgatcaaaggaagctcgttccctttggcctcagggtttcttagacgccgtgttccc

SEQ ID NO: 429 - DNA, 1084 bp, synthetic construct
  source 1..1084: mol_type = other DNA
gtttcttttgtaatccgaaacattctagtctgcgaattaaaagccattatttgaagaaggatgccccggctccatctggccaccgaaaggttgctccttaacacaggctaaggaccagcttctttgggagagaacagacgcaggggcgggagggaaaaagggagaggcagacgtcacttccccttggcggctctggcagcagattggtcggttgagtggcagaaaggcagacggggactgggcaaggcactgtcggtgacatcacggacagggcgacttctatgtagatgaggcagcgcagaggctgctgcttcgccacttgctgcttcgccacgaaggagttcccgtgccctgggagcgggttcaggaccgcggatcggaagtgagaatcccagctgtgtgtcagggctggaaagggctcgggagtgcgcggggcaagtgaccgtgtgtgtaaagagtgaggcgtatgaggctgtgtcggggcagagcccgaagatctcaatgatagggacttagggtgatagaagtgcaaagcatgactgtcaaatttttggagcaggttttctgacttcggtcggaaaacccctataactggtaaccaaaagcagattactttcccccttgtggtcttcgcgtttgcggacgggagagaactttcggccattttccttttagaaatttaacttcttgaaggccaccaggtgacccttacttccctctcacctttccttctacctgtactttctctattaaaaagcctgcagaagtacccttgacaaattgccaaaaatgacacctaaaaaaaaaaaaaggaaaaacgacaccttaggtaattataggttgtaagaaaaagatttgacctcttggagtttttatttcttaataccaaaggacacccaaggaacgtatctctcaaaattgggtttcaaacctcagccgtttccttcttagttccagtgcttaacacgcaacagacctgcacaccactacactgcatacgagttttaaagttaataaatcagtcacccctccatagtcttctacctacttgaagacagaaacggctgctaggaagcaattcttc

SEQ ID NO: 430 - DNA, 1087 bp, synthetic construct
  source 1..1087: mol_type = other DNA
gtttcttttgtaatccgaaacattctagtctgcgaattaaaagccattatttgaagaaggatgccccggctccatctggccaccgaaaggttgctccttaacacaggctaaggaccagcttctttgggagagaacagacgcaggggcgggagggaaaaagggagaggcagacgtcacttccccttggcggctctggcagcagattggtcggttgagtggcagaaaggcagacggggactgggcaaggcactgtcggtgacatcacggacagggcgacttctatgtagatgaggcagcgcagaggctgctgcttcgccacttgctgcttcgccacgaaggagttcccgtgccctgggagcgggttcaggaccgcggatcggaagtgagaatcccagctgtgtgtcagggctggaaagggctcgggagtgcgcggggcaagtgaccgtgtgtgtaaagagtgaggcgtatgaggctgtgtcggggcagagcccgaagatctcaatgatagggacttagggtgatagaagtgcaaagcatgactgtcaaatttttggagcaggttttctgacttcggtcggaaaacccctctggggaataagagtggtttaaagaaagaacaatttgagagatctgcttagatctaataaaacccaagtatagtttctttagacgtcttatatctcacgtaggacctcttatttcagactcactgcaagaacaagctaaagaactatatacagtcaggaacaaggtgagccatcgcggttctcagtcccatgatcttaagagtttttcctcttcccctcttccctggctgtcctggagctcactctgtagaccaggctggtctcaaactcagaaatccacttacctctgcctcccaagggctgggattaaaggcatgcaccaccattgcccggcagggtatgtggactatgctgtccttcaactcagagatcgtggtactttaaatctcattttccgaaagaaaagaaaagaaaggaaggggggaaataaagccagtatattttgcacccacaatctgaagttctacaaatattgttagaaaatgcaaaggacccaagtc

SEQ ID NO: 431 - DNA, 1087 bp, synthetic construct
  source 1..1087: mol_type = other DNA
gtttcttttgtaatccgaaacattctagtctgcgaattaaaagccattatttgaagaaggatgccccggctccatctggccaccgaaaggttgctccttaacacaggctaaggaccagcttctttgggagagaacagacgcaggggcgggagggaaaaagggagaggcagacgtcacttccccttggcggctctggcagcagattggtcggttgagtggcagaaaggcagacggggactgggcaaggcactgtcggtgacatcacggacagggcgacttctatgtagatgaggcagcgcagaggctgctgcttcgccacttgctgcttcgccacgaaggagttcccgtgccctgggagcgggttcaggaccgcggatcggaagtgagaatcccagctgtgtgtcagggctggaaagggctcgggagtgcgcggggcaagtgaccgtgtgtgtaaagagtgaggcgtatgaggctgtgtcggggcagagcccgaagatctcaatgatagggacttagggtgatagaagtgcaaagcatgactgtcaaatttttggagcaggttttctgacttcggtcggaaaacccctctcggtttatcttaaagggttttaaatatagaaagcttccttagtcttatgggtgagagtgctgtttaagccttacctaggtatgtctttgaacatttattacagattgttatttgtgactatgaccactcaggtgttctgttcttgtgaatttagacacactcagaaaggctacacactcaaagaccacaccaaagtgaagtactatctgggccgtgaaactggtcacatatcagttattttgcagtaaaacaaggaagtcaatcatactgcttcagtgggtcagggagtcaagaatgcacagtacaagagctggtgagattcctcagcaggtaagagcactgaatgctcttccaaagattctgagttcaaatcccagcaaccacgtggtggatttgaacaaaggatgaaaacaaccatccataaccagatctgatgccctcttctggagtgtcaaaagacagctatggtgtacttacataaataaataagtaaaaaca

SEQ ID NO: 432 - DNA, 1087 bp, synthetic construct
  source 1..1087: mol_type = other DNA
gtttcttttgtaatccgaaacattctagtctgcgaattaaaagccattatttgaagaaggatgccccggctccatctggccaccgaaaggttgctccttaacacaggctaaggaccagcttctttgggagagaacagacgcaggggcgggagggaaaaagggagaggcagacgtcacttccccttggcggctctggcagcagattggtcggttgagtggcagaaaggcagacggggactgggcaaggcactgtcggtgacatcacggacagggcgacttctatgtagatgaggcagcgcagaggctgctgcttcgccacttgctgcttcgccacgaaggagttcccgtgccctgggagcgggttcaggaccgcggatcggaagtgagaatcccagctgtgtgtcagggctggaaagggctcgggagtgcgcggggcaagtgaccgtgtgtgtaaagagtgaggcgtatgaggctgtgtcggggcagagcccgaagatctcaatgatagggacttagggtgatagaagtgcaaagcatgactgtcaaatttttggagcaggttttctgacttcggtcggaaaacccctccacattttgtgtttaaaaatagaaatatttaagtgagatcagtttaaatctgctttatctagggtgtctaactgcttgcatctttttaacttttccttatttgtgagaaggtctgtaaaacttattatatgttagtacactgtagctgtcttcagacactccagaagagggattcagatcaccttacagatggttttgagccaccatgtggttgctgggatttgaactcaggacctttagaaaagtagttgggtgctcttacccgctgagccatctcaccagccctttttttttcttttttccagttcgggtttctctgtgtgtagccctggctgtcctggaactcattctgtagaccgggctggcctcgaactcagaaatctgcctgcctctgcctcccaagtgctgggattaaaggaatgtgccttcattgcccggctctagggctttttgttgttgtttgtttgtttgtttgtttgtttgcttttgtggatggcct

SEQ ID NO: 433 - DNA, 1087 bp, synthetic construct
  source 1..1087: mol_type = other DNA
gtttcttttgtaatccgaaacattctagtctgcgaattaaaagccattatttgaagaaggatgccccggctccatctggccaccgaaaggttgctccttaacacaggctaaggaccagcttctttgggagagaacagacgcaggggcgggagggaaaaagggagaggcagacgtcacttccccttggcggctctggcagcagattggtcggttgagtggcagaaaggcagacggggactgggcaaggcactgtcggtgacatcacggacagggcgacttctatgtagatgaggcagcgcagaggctgctgcttcgccacttgctgcttcgccacgaaggagttcccgtgccctgggagcgggttcaggaccgcggatcggaagtgagaatcccagctgtgtgtcagggctggaaagggctcgggagtgcgcggggcaagtgaccgtgtgtgtaaagagtgaggcgtatgaggctgtgtcggggcagagcccgaagatctcaatgatagggacttagggtgatagaagtgcaaagcatgactgtcaaatttttggagcaggttttctgacttcggtcggaaaacccctaaaaccagtaagggagaaaggtcaagtaacatataaaggaaggcctatcagaattacaccagacttttcaccagagactatgaaagccagaagagcctggacagatgttatacagacactaagagaacacaaatgccagcccaggctactatacctggccaaactctcaattaccatagatggagaaaccaaagtattccacgacaaaaacaaattcacacaatatctttccacgaatccagcccttcaaaggataatgacagaaaagaagcaatacaaggacggaaatcacgccctagaacaaccaagaaactaatcattcaacaaaccaaaaagaagacagccacaagaacagaatgccaactctaacaacaaaaataaaaggaagcaacaattacttttccttaatatctcttaatatcaatggactcaattccccaataaaaagacatagactaacagactggctacacaaacaggacccaacattctgctgctta

SEQ ID NO: 434 - DNA, 1087 bp, synthetic construct
  source 1..1087: mol_type = other DNA
gtttcttttgtaatccgaaacattctagtctgcgaattaaaagccattatttgaagaaggatgccccggctccatctggccaccgaaaggttgctccttaacacaggctaaggaccagcttctttgggagagaacagacgcaggggcgggagggaaaaagggagaggcagacgtcacttccccttggcggctctggcagcagattggtcggttgagtggcagaaaggcagacggggactgggcaaggcactgtcggtgacatcacggacagggcgacttctatgtagatgaggcagcgcagaggctgctgcttcgccacttgctgcttcgccacgaaggagttcccgtgccctgggagcgggttcaggaccgcggatcggaagtgagaatcccagctgtgtgtcagggctggaaagggctcgggagtgcgcggggcaagtgaccgtgtgtgtaaagagtgaggcgtatgaggctgtgtcggggcagagcccgaagatctcaatgatagggacttagggtgatagaagtgcaaagcatgactgtcaaatttttggagcaggttttctgacttcggtcggaaaacccctcccaatttcactggtctacaatgaaagcaaaacagttctcttccccgctccccggtgtgtgagaggggctttgatccttctctggtttcctaggaaacgcgtatgtgctagagccacgctctgagacttccgcctcgtgcggtcccgcttcctttctgcctcctctggcctgcatccgtgggggaggtggctggctgcagggttctccggatctcttctgtgttcccactactcaagcaccgagtggcgttctatggcgtccgcctcggctcagcccgcggccctgagcgcggagcaggccaagggtgaggaaagagcctagtctgggtgtgggccgtcttctggggggagggcgcgatactattctttgcctctccaagtggggcccttgcccattagggcgaagggttgggaggacaagcttatcgggttgcttgcaggcctcggcccactaattccctgcctcttccctcctctgggctcgcccgccgtcctccgcg

SEQ ID NO: 435 - DNA, 1087 bp, synthetic construct
  source 1..1087: mol_type = other DNA
gtttcttttgtaatccgaaacattctagtctgcgaattaaaagccattatttgaagaaggatgccccggctccatctggccaccgaaaggttgctccttaacacaggctaaggaccagcttctttgggagagaacagacgcaggggcgggagggaaaaagggagaggcagacgtcacttccccttggcggctctggcagcagattggtcggttgagtggcagaaaggcagacggggactgggcaaggcactgtcggtgacatcacggacagggcgacttctatgtagatgaggcagcgcagaggctgctgcttcgccacttgctgcttcgccacgaaggagttcccgtgccctgggagcgggttcaggaccgcggatcggaagtgagaatcccagctgtgtgtcagggctggaaagggctcgggagtgcgcggggcaagtgaccgtgtgtgtaaagagtgaggcgtatgaggctgtgtcggggcagagcccgaagatctcaatgatagggacttagggtgatagaagtgcaaagcatgactgtcaaatttttggagcaggttttctgacttcggtcggaaaacccctgaatttgttaaattacaggaggaagcttttttagttcattttacaaatactttcttgttaggtagataataccttctaaggttattatctggatcttctaagtctttttatcgctagcaagtctaagtttctggactttggaattagaagttaatgtcgtaggcgggcatggtggtccacgcctttaatcccagagtttgggaggcagacgcaggtggttttctgagttcgaggccatcctgctcttcaatgttagttccaggacagccagggttatacaaagaaaccctgtctcgagaaacaaaacaaacaaaaaaagagtagctgagtgctctgagttgtctctccagccccttagctatttattttcatttaaattatttttgttttattcgcttgtgtgcctgagtttgaatttcccgggattaacagttgaagactagggctggtgagatggctcagcggttaagattgccgactgctcttccaaaggtcctgag

SEQ ID NO: 436 - DNA, 1087 bp, synthetic construct
  source 1..1087: mol_type = other DNA
gtttcttttgtaatccgaaacattctagtctgcgaattaaaagccattatttgaagaaggatgccccggctccatctggccaccgaaaggttgctccttaacacaggctaaggaccagcttctttgggagagaacagacgcaggggcgggagggaaaaagggagaggcagacgtcacttccccttggcggctctggcagcagattggtcggttgagtggcagaaaggcagacggggactgggcaaggcactgtcggtgacatcacggacagggcgacttctatgtagatgaggcagcgcagaggctgctgcttcgccacttgctgcttcgccacgaaggagttcccgtgccctgggagcgggttcaggaccgcggatcggaagtgagaatcccagctgtgtgtcagggctggaaagggctcgggagtgcgcggggcaagtgaccgtgtgtgtaaagagtgaggcgtatgaggctgtgtcggggcagagcccgaagatctcaatgatagggacttagggtgatagaagtgcaaagcatgactgtcaaatttttggagcaggttttctgacttcggtcggaaaacccctaccccctaattctacaagaatagaaagcttagcagctcctctgaatggttgctctcaggtgctagtggttgcaagtcgtatgttgatgcctgcctttgccctacctggtgtgtgagcgtgagcgcgccccacctctccagcctctctcttactgtttttcagacaagatgggactgttgttctcctactgctatgtacctcaatttcaattgatcatgcctggacataactgcccatgttgtaaggtcgtctacgttgtaaggtcgtgctcagtttctgatgcctagactagtcacctttccgtttgcctcctgactgtgtaaatgaggcaaatgaaggtggtctcttaactgacatgttagtgtttgacctatgggatagtttctcattgttgagacagaatttctagaagctggtccgctgagcggctaagagcacttgctgatattgcaaaggatctacctgggtttggttctcagcactcacatggaagttcacat

SEQ ID NO: 437 - DNA, 654 bp, synthetic construct
  source 1..654: mol_type = other DNA
gtttcttttgtaatccgaaacattctagtctgcgaattaaaagccattatttgaagaaggatgccccggctccatctggccaccgaaaggttgctccttaacacaggctaaggaccagcttctttgggagagaacagacgcaggggcgggagggaaaaagggagaggcagacgtcacttccccttggcggctctggcagcagattggtcggttgagtggcagaaaggcagacggggactgggcaaggcactgtcggtgacatcacggacagggcgacttctatgtagatgaggcagcgcagaggctgctgcttcgccacttgctgcttcgccacgaaggagttcccgtgccctgggagcgggttcaggaccgcggatcggaagtgagaatcccagctgtgtgtcagggctggaaagggctcgggagtgcgcggggcaagtgaccgtgtgtgtaaagagtgaggcgtatgaggctgtgtcggggcagagcccgaagatctcaatgatagggacttagggtgatagaagtgcaaagcatgactgtcaaatttttggagcaggttttctgacttcggtcggaaaaccccttgtagttcctgcaatttaattttcgtttaaaactttattttattctttaacttaaaaaaaatatata

SEQ ID NO: 438 - DNA, 1087 bp, synthetic construct
  source 1..1087: mol_type = other DNA
tctccccgcccgcgggcggcgaagtaaaggcccagcgcagcccgcgctcctgccctggagcctcgtctttctccaggaaaacgtggaccgctctccgccgacaggtctcttccacagacccctgtcgccttcgcccccggtctcttccggttctgtcttttcgctggctcgatacgaacaaggaagtcgcccccagcggagccccggctcccccaggcagaggcggccccgggggcggagtcaacggcggaggccacgccctctgtgaaagggcggggcatgcaaattcgaaatgaaagcccgggaacgccggaagaagcacgggtgtaagatttcccttttcaaaggcagagaataagaaatcagcccgagagtgtaagggcgtcaatagcgctgtggacgagacagagggaatggggcaaggagcgaggctggggctctcaccgcgacttgaatgtggatgagagtgggacggtgacggcgggcgcgaaggcgagcgcaatgatagggacttagggtgatagaagtgcaaagcatgactgtcaaatttttggagcaggttttctgacttcggtcggaaaacccctactttctggagtttcaaaaacagactgtacgccaagggtcatatctttttttgtattggtttgtgtcttggttggtgtcttaggtgttaatcctacagtggagggtttatgggaataggaagtaacatgtcgcctgcatgtcataggagaaaaagcgagcatcagccgtatcggctttgtaacacaaattagctatcgtgaagtccgctcagctcttccctttctaccctggctgctttttgcagggattggtccgtggtctccagtctcttgggttctcaccctgtgtgaaaatcttcgtgtttttccctaccccccagtcacctcttacacagcctctgcttccaagcgcagcccccacaggagtttgtaggatttctgtgctagcggggaatgtgttctcacctcatagagccaggtagaaattatgcagatgggcagttctctgggaagaaagcagggcctttggggctctcagtgtccccgttgggttgtagaca

SEQ ID NO: 439 - DNA, 1087 bp, synthetic construct
  source 1..1087: mol_type = other DNA
tctccccgcccgcgggcggcgaagtaaaggcccagcgcagcccgcgctcctgccctggagcctcgtctttctccaggaaaacgtggaccgctctccgccgacaggtctcttccacagacccctgtcgccttcgcccccggtctcttccggttctgtcttttcgctggctcgatacgaacaaggaagtcgcccccagcggagccccggctcccccaggcagaggcggccccgggggcggagtcaacggcggaggccacgccctctgtgaaagggcggggcatgcaaattcgaaatgaaagcccgggaacgccggaagaagcacgggtgtaagatttcccttttcaaaggcagagaataagaaatcagcccgagagtgtaagggcgtcaatagcgctgtggacgagacagagggaatggggcaaggagcgaggctggggctctcaccgcgacttgaatgtggatgagagtgggacggtgacggcgggcgcgaaggcgagcgcaatgatagggacttagggtgatagaagtgcaaagcatgactgtcaaatttttggagcaggttttctgacttcggtcggaaaacccctactttctggagtttctaaaagtagactgtacgctaagggtcatatctttttttgttttggtttgtgtcttggttggcgtcttaaatgttaatcctacagtggagggctggcgaataggaagtaacatgtcgcctgcacgccataggagaaaaagcgagcatcagccgtatcggctttgtaacacaaattagctatcgtgaagtccgctcagctcttccctttctaccctggctgctttttgcagggattggtccgtggtctccagtctcttgggttctcaccctgtgtgaaaatcttcctgtttttccctaccccccaagtcacctcttacacagcctctgcttccaagcgcagcccccacaggagtttgtaggatttctgtgctagcggggagtgtgttctcacctcatagagccaggtagaaactacgcagatgggtgctgttctccaggaagaaagcagggcctttggggctctcagtgtccccgttgggttgtaga

SEQ ID NO: 440 - DNA, 1087 bp, synthetic construct
  source 1..1087: mol_type = other DNA
tctccccgcccgcgggcggcgaagtaaaggcccagcgcagcccgcgctcctgccctggagcctcgtctttctccaggaaaacgtggaccgctctccgccgacaggtctcttccacagacccctgtcgccttcgcccccggtctcttccggttctgtcttttcgctggctcgatacgaacaaggaagtcgcccccagcggagccccggctcccccaggcagaggcggccccgggggcggagtcaacggcggaggccacgccctctgtgaaagggcggggcatgcaaattcgaaatgaaagcccgggaacgccggaagaagcacgggtgtaagatttcccttttcaaaggcagagaataagaaatcagcccgagagtgtaagggcgtcaatagcgctgtggacgagacagagggaatggggcaaggagcgaggctggggctctcaccgcgacttgaatgtggatgagagtgggacggtgacggcgggcgcgaaggcgagcgcaatgatagggacttagggtgatagaagtgcaaagcatgactgtcaaatttttggagcaggttttctgacttcggtcggaaaacccctactttctggagtttcaaaaacagaccgtacgccaagggtcatgtcttttttcgtattggtttgtgtcttagttgttaatcctacagtggaggcctggggaataagaagtaacatgtggcctgcacgccataggagaaaaagcgagcatcagccgtatcggctttgtaacacaaattagctatcgtgaagtccgctcagctcttccatttctaccctggctgctttttgcagggattggtccgtggtctccagtctcttgggttctcaccctgtgtgaaaatcttcgtgtttttccctaccccccaagtcacctcttacacagcctctgcttccaagcgcagcccccacaggagtttgtaggatttctgtgctagcggggagtgtgttctcacctcatagagccaggtagaaattatgcagatgggcgctgttctctgggaagaaagcagggcctttggggctctcagtgtccccgttgggttgtagacataacactctta

SEQ ID NO: 441 - DNA, 891 bp, synthetic construct
  source 1..891: mol_type = other DNA
tctccccgcccgcgggcggcgaagtaaaggcccagcgcagcccgcgctcctgccctggagcctcgtctttctccaggaaaacgtggaccgctctccgccgacaggtctcttccacagacccctgtcgccttcgcccccggtctcttccggttctgtcttttcgctggctcgatacgaacaaggaagtcgcccccagcggagccccggctcccccaggcagaggcggccccgggggcggagtcaacggcggaggccacgccctctgtgaaagggcggggcatgcaaattcgaaatgaaagcccgggaacgccggaagaagcacgggtgtaagatttcccttttcaaaggcagagaataagaaatcagcccgagagtgtaagggcgtcaatagcgctgtggacgagacagagggaatggggcaaggagcgaggctggggctctcaccgcgacttgaatgtggatgagagtgggacggtgacggcgggcgcgaaggcgagcgcaatgatagggacttagggtgatagaagtgcaaagcatgactgtcaaatttttggagcaggttttctgacttcggtcggaaaacccctcctccggggatacaacgtgtttcctaaaagtagagggaggtaagagacggtagcacctgcggggcggcttgcacgccgagtgcctgtgacgcgccggcttaacttaactgcttccctgaagtaccttgaggttcctgatgtgcgggcggtagacggtaggcttatgcggcacgctgtcgtttccaccgtggctactgcgctttgggaaggccacgacctcctcctttggggaggtccttaggatctcagcttggcagtcgagtgggtggcgaccttttaaaggaatgggacccacccggagttc

SEQ ID NO: 442 - DNA, 1079 bp, synthetic construct
  source 1..1079: mol_type = other DNA
tctccccgcccgcgggcggcgaagtaaaggcccagcgcagcccgcgctcctgccctggagcctcgtctttctccaggaaaacgtggaccgctctccgccgacaggtctcttccacagacccctgtcgccttcgcccccggtctcttccggttctgtcttttcgctggctcgatacgaacaaggaagtcgcccccagcggagccccggctcccccaggcagaggcggccccgggggcggagtcaacggcggaggccacgccctctgtgaaagggcggggcatgcaaattcgaaatgaaagcccgggaacgccggaagaagcacgggtgtaagatttcccttttcaaaggcagagaataagaaatcagcccgagagtgtaagggcgtcaatagcgctgtggacgagacagagggaatggggcaaggagcgaggctggggctctcaccgcgacttgaatgtggatgagagtgggacggtgacggcgggcgcgaaggcgagcgcaatgatagggacttagggtgatagaagtgcaaagcatgactgtcaaatttttggagcaggttttctgacttcggtcggaaaacccctttcccttcttgtaatacaaaataataacaaccacagaggacatcgcaagtaaaatgtgtataacaaccccatctaaagaaccctatcatctttctactatctgtctacctaaatatgtatagtataaataaccctatatagcactctaagcaacttaagttaggtaacttagaaaactcttttttttttttgagactgagtctcactctgtcgcacccaggctggagtgcagtggcgtgatctcggctcactgcaacctccaccttctgggttcaagtgattctcccatctcagtctcccaagtagctgggattacaggcacgccaccatgccctgctacatttttttttttttagtagagatgaggtttcaccacattggccaggctgttctcgaactcctgacctcaggtgatccgcccaccttggcctcatgaagtgctgggattacaggtgtgagccactgtacccagccagaaaactcttaaaaaac

SEQ ID NO: 443 - DNA, 969 bp, synthetic construct
  source 1..969: mol_type = other DNA
tctccccgcccgcgggcggcgaagtaaaggcccagcgcagcccgcgctcctgccctggagcctcgtctttctccaggaaaacgtggaccgctctccgccgacaggtctcttccacagacccctgtcgccttcgcccccggtctcttccggttctgtcttttcgctggctcgatacgaacaaggaagtcgcccccagcggagccccggctcccccaggcagaggcggccccgggggcggagtcaacggcggaggccacgccctctgtgaaagggcggggcatgcaaattcgaaatgaaagcccgggaacgccggaagaagcacgggtgtaagatttcccttttcaaaggcagagaataagaaatcagcccgagagtgtaagggcgtcaatagcgctgtggacgagacagagggaatggggcaaggagcgaggctggggctctcaccgcgacttgaatgtggatgagagtgggacggtgacggcgggcgcgaaggcgagcgcaatgatagggacttagggtgatagaagtgcaaagcatgactgtcaaatttttggagcaggttttctgacttcggtcggaaaacccctctgaattttcttgcagttgaacaacagaggctttttttgtgtgtgtgggggtgcttggttttgggaggttgaagagtacttgttcgcaaactctctaaatgagagatggggaagtgtcttaccagctgattcgcgagagcacctgcaagtttacctgttttagtgatttgcgtttatgaaagttggagttgctgattttgtgatctctacttttaaggtaaaagcagggcggtgttgacttttcttgccagttggctgtcctgttttctttctcgcactgttttctttttgagacgaagtctgtcgctcaggctggagtgcactggcgtgatctcggctcgctgcaaactttgccgaacccctgtttagcgatttccgtttg

SEQ ID NO: 444 - DNA, 1087 bp, synthetic construct
  source 1..1087: mol_type = other DNA
tctccccgcccgcgggcggcgaagtaaaggcccagcgcagcccgcgctcctgccctggagcctcgtctttctccaggaaaacgtggaccgctctccgccgacaggtctcttccacagacccctgtcgccttcgcccccggtctcttccggttctgtcttttcgctggctcgatacgaacaaggaagtcgcccccagcggagccccggctcccccaggcagaggcggccccgggggcggagtcaacggcggaggccacgccctctgtgaaagggcggggcatgcaaattcgaaatgaaagcccgggaacgccggaagaagcacgggtgtaagatttcccttttcaaaggcagagaataagaaatcagcccgagagtgtaagggcgtcaatagcgctgtggacgagacagagggaatggggcaaggagcgaggctggggctctcaccgcgacttgaatgtggatgagagtgggacggtgacggcgggcgcgaaggcgagcgcaatgatagggacttagggtgatagaagtgcaaagcatgactgtcaaatttttggagcaggttttctgacttcggtcggaaaacccctatatgtggtaatccaacaatagaaattatttttaagtttgtgtgttcctttttctgttcaatggtgcttttgatattgttgtaaagcagtgactagcagattctgtgtggtaaaagcactgaaccctgtttagttcttttctccctaccttattggtaattatttctgtgtatatatgttccaaagaaatgcggcttgtatattcatgcttttcaactttttgtgatagacagttgatacacaagtagtacctcctccgggatcttcttagtcaagactgtttggtagatgcatgttttttgttacttgtaatgtacagtattcagttcattttctttttgcagcactgtccggttgaaacacaacgcgaggatcgggcgtggtggctcacgcctgtaatcccagcactttgggaggccgaggcaggacaatcaagaccaatcctggtcatcaaggcaggagaatcaagaccatcgaggtcaggagatcaagaccatcct

SEQ ID NO: 445 - DNA, 1085 bp, synthetic construct
  source 1..1085: mol_type = other DNA
tctccccgcccgcgggcggcgaagtaaaggcccagcgcagcccgcgctcctgccctggagcctcgtctttctccaggaaaacgtggaccgctctccgccgacaggtctcttccacagacccctgtcgccttcgcccccggtctcttccggttctgtcttttcgctggctcgatacgaacaaggaagtcgcccccagcggagccccggctcccccaggcagaggcggccccgggggcggagtcaacggcggaggccacgccctctgtgaaagggcggggcatgcaaattcgaaatgaaagcccgggaacgccggaagaagcacgggtgtaagatttcccttttcaaaggcagagaataagaaatcagcccgagagtgtaagggcgtcaatagcgctgtggacgagacagagggaatggggcaaggagcgaggctggggctctcaccgcgacttgaatgtggatgagagtgggacggtgacggcgggcgcgaaggcgagcgcaatgatagggacttagggtgatagaagtgcaaagcatgactgtcaaatttttggagcaggttttctgacttcggtcggaaaacccctacatcaggttgtttttctgtttttacatcaggttgtttttctgtttggttttttttttacaccacgtttatacgccggtgcacggtttaccactgaaaacacctttcatctacaggtgatatcttttaacacaaataaaatgtagtagtcctaggagacggaatagaaggaggtggggcctaggcagattcatctctgcggtgcattttgcctctggccctcgggccctagtttgcgatctttcccatcttgcctctgcttccctctgcacaatcctgagtattgcagtaccttacacttaaggaaatttcgtcttgccaaagttgatccatttcagctccgaaacataacaggaactagtgcaacgataaacgtatgaggaacttgcaataagagtgacagaatcctttgaatcaaaaaaaaaaaaagccaccacttaatgagtatctaccatatgtcaagggcttcaccaatatttcattgaaatattccagacca

SEQ ID NO: 446 - DNA, 1087 bp, synthetic construct
  source 1..1087: mol_type = other DNA
tctccccgcccgcgggcggcgaagtaaaggcccagcgcagcccgcgctcctgccctggagcctcgtctttctccaggaaaacgtggaccgctctccgccgacaggtctcttccacagacccctgtcgccttcgcccccggtctcttccggttctgtcttttcgctggctcgatacgaacaaggaagtcgcccccagcggagccccggctcccccaggcagaggcggccccgggggcggagtcaacggcggaggccacgccctctgtgaaagggcggggcatgcaaattcgaaatgaaagcccgggaacgccggaagaagcacgggtgtaagatttcccttttcaaaggcagagaataagaaatcagcccgagagtgtaagggcgtcaatagcgctgtggacgagacagagggaatggggcaaggagcgaggctggggctctcaccgcgacttgaatgtggatgagagtgggacggtgacggcgggcgcgaaggcgagcgcaatgatagggacttagggtgatagaagtgcaaagcatgactgtcaaatttttggagcaggttttctgacttcggtcggaaaacccctcttatgatgtttgttgccaatgatagattgttttcactgtgcaaaaattatgggtagttttggtggtcttgatgcagttgtaagcttggggtatgaaggtttgggccacgcctgggcgcttccggctgcgccggatgctgtttcctttccgctcccaggggcgttgggaacggttgtaggacgtggctctttattcgtgagttttccatttacctccgctgaacctagagcttcagacgccctatggcgtccgcctcgacccaaccggcggccttgagcgctgagcaagcaaagggtgagaatcgtcctagtcaaggcataggctgctggcctggggtagtcaaggcatgggctgctggtctggggaggatgcgggcggaggatgtggggcgacaaacctggctacgtccgccgggaaaatggggtaggggacgccgggtaccgtccttctaagtggggcgcttgcccccaagacttgggatcttattgggttacctaca

SEQ ID NO: 447 - DNA, 1085 bp, synthetic construct
  source 1..1085: mol_type = other DNA
tctccccgcccgcgggcggcgaagtaaaggcccagcgcagcccgcgctcctgccctggagcctcgtctttctccaggaaaacgtggaccgctctccgccgacaggtctcttccacagacccctgtcgccttcgcccccggtctcttccggttctgtcttttcgctggctcgatacgaacaaggaagtcgcccccagcggagccccggctcccccaggcagaggcggccccgggggcggagtcaacggcggaggccacgccctctgtgaaagggcggggcatgcaaattcgaaatgaaagcccgggaacgccggaagaagcacgggtgtaagatttcccttttcaaaggcagagaataagaaatcagcccgagagtgtaagggcgtcaatagcgctgtggacgagacagagggaatggggcaaggagcgaggctggggctctcaccgcgacttgaatgtggatgagagtgggacggtgacggcgggcgcgaaggcgagcgcaatgatagggacttagggtgatagaagtgcaaagcatgactgtcaaatttttggagcaggttttctgacttcggtcggaaaaccccttctttactgttatatgttaggcgaaatattacgcgtttggagtaagtggtgctttttgtaactgaaaagagattctgtgtgtgtttttttttttttagaggctgcatagttatttgtatgaaccgcaggtgacctaattagcaaggtaattcagacctgtatcctagcacttaagaagtggaagtgggataaccctgcgtgttctcgtgtgggaggctagcttaagcaacaaagcaggaaggccccaccaacaaaagaatttaaaaattatacgtgcgtggtggcgcgcgtatgaggaaattatttggcaactgtgttacagtatagcagcaaatggaatagacctagtccctgactttaggagacctgcctcagccccccgaatggctgggactacaggcgtgcgcctccgcgcccagctaatttttgcatttttggtagagacgggttcaccatgttggccaggatggtctccatctcttcatctggtgatccgcc

SEQ ID NO: 448 - DNA, 1087 bp, synthetic construct
  source 1..1087: mol_type = other DNA
tctccccgcccgcgggcggcgaagtaaaggcccagcgcagcccgcgctcctgccctggagcctcgtctttctccaggaaaacgtggaccgctctccgccgacaggtctcttccacagacccctgtcgccttcgcccccggtctcttccggttctgtcttttcgctggctcgatacgaacaaggaagtcgcccccagcggagccccggctcccccaggcagaggcggccccgggggcggagtcaacggcggaggccacgccctctgtgaaagggcggggcatgcaaattcgaaatgaaagcccgggaacgccggaagaagcacgggtgtaagatttcccttttcaaaggcagagaataagaaatcagcccgagagtgtaagggcgtcaatagcgctgtggacgagacagagggaatggggcaaggagcgaggctggggctctcaccgcgacttgaatgtggatgagagtgggacggtgacggcgggcgcgaaggcgagcgcaatgatagggacttagggtgatagaagtgcaaagcatgactgtcaaatttttggagcaggttttctgacttcggtcggaaaacccctaccttattcacgcctaaaaagtagactgactgtggggtggtcgtgttttttgtttcttgttggtaggtggtgaatgcgtttttttcgttgttttctccgttactcaggctgccagttgcttggcagtcttgtcgctggctgtggacgctctgcacttcatcaccgtccccagctgcgctttgagccggtctaaggttgcccacagtattgacgttgggacccacgaaactggcaatttccatgtgtgcggccttacccagttctcccaaacttctgcgtataaccgcttctctgtgcttcagaaagataagtccggccccggcctcacacagcagctcagttcgtgacagcgtttaatatgtaaaatggagcaaataatttatagggcgttgggagagttaaagagactaattcatttacgtgttaaatacagggaatggcttttgcattgatataaccccagcctccagcatgcgccagacctgacgtaggtgttcggc

SEQ ID NO: 449 - DNA, 1087 bp, synthetic construct
  source 1..1087: mol_type = other DNA
tctccccgcccgcgggcggcgaagtaaaggcccagcgcagcccgcgctcctgccctggagcctcgtctttctccaggaaaacgtggaccgctctccgccgacaggtctcttccacagacccctgtcgccttcgcccccggtctcttccggttctgtcttttcgctggctcgatacgaacaaggaagtcgcccccagcggagccccggctcccccaggcagaggcggccccgggggcggagtcaacggcggaggccacgccctctgtgaaagggcggggcatgcaaattcgaaatgaaagcccgggaacgccggaagaagcacgggtgtaagatttcccttttcaaaggcagagaataagaaatcagcccgagagtgtaagggcgtcaatagcgctgtggacgagacagagggaatggggcaaggagcgaggctggggctctcaccgcgacttgaatgtggatgagagtgggacggtgacggcgggcgcgaaggcgagcgcaatgatagggacttagggtgatagaagtgcaaagcatgactgtcaaatttttggagcaggttttctgacttcggtcggaaaaccccttttgacccattacccatctaagttagatgcttttttaaatgttttttaatttttaaatttttaatttttttcattatttattttttatttttgagacggatctcggctcactgtaacctccacctcccgggttcaagcgattctcctgactcagcctcccgagtagctgggattacaggcgcgcgccaccatgcccggctaatttttctatttttagtaaagacggggtttcgccatgttgaccagggtggtcttgaactcctgacgtcaggtgatcctcctgcctcgtgctgggattgcaggcgtgagccaccgctcccggcccttagatgctttttaatcagcaagtacgcaatgctttcctgacaggaatgtcaagtccgtcaggaaatccacataagggtgttaagcaggcaaagtaccacatacagattaaaatcaaaagcactgtcaacgcttatttaatttatacagtagaccctaacttttctaattttgtg

SEQ ID NO: 450 - DNA, 1087 bp, synthetic construct
  source 1..1087: mol_type = other DNA
tctccccgcccgcgggcggcgaagtaaaggcccagcgcagcccgcgctcctgccctggagcctcgtctttctccaggaaaacgtggaccgctctccgccgacaggtctcttccacagacccctgtcgccttcgcccccggtctcttccggttctgtcttttcgctggctcgatacgaacaaggaagtcgcccccagcggagccccggctcccccaggcagaggcggccccgggggcggagtcaacggcggaggccacgccctctgtgaaagggcggggcatgcaaattcgaaatgaaagcccgggaacgccggaagaagcacgggtgtaagatttcccttttcaaaggcagagaataagaaatcagcccgagagtgtaagggcgtcaatagcgctgtggacgagacagagggaatggggcaaggagcgaggctggggctctcaccgcgacttgaatgtggatgagagtgggacggtgacggcgggcgcgaaggcgagcgcaatgatagggacttagggtgatagaagtgcaaagcatgactgtcaaatttttggagcaggttttctgacttcggtcggaaaacccctgtttacttggttttaaaaatagcttgcactagcgataccgcgaatatggttattaggtttgttaggcacagtcgtgtcttactatagaaaaataacgtagtgttcattttgctgcctgtatgtgttaatttgtccttattgcgccattgttcttgttaagtcttctgtaaggagttgcgggtttcaaactgtcagtctgagagcataagctcacttttcagtcagttgaattgaatgttacattcgattggttctggatattgatattacccaaggcttgtcctgtttgtaagtcttttcctacacctgacaatatgattatgtttacaatgtccctagaactctgggtgtatcgttcccactgaataaaatttgatctctaagttgacctataaatttaagtaccaaaaaactggtttgtaagattttggaaggcagaggcagggaagagaccaacgtggtctacatataaagtaccaggtacatataaagtaccaggt

SEQ ID NO: 451 - DNA, 1083 bp, synthetic construct
  source 1..1083: mol_type = other DNA
tctccccgcccgcgggcggcgaagtaaaggcccagcgcagcccgcgctcctgccctggagcctcgtctttctccaggaaaacgtggaccgctctccgccgacaggtctcttccacagacccctgtcgccttcgcccccggtctcttccggttctgtcttttcgctggctcgatacgaacaaggaagtcgcccccagcggagccccggctcccccaggcagaggcggccccgggggcggagtcaacggcggaggccacgccctctgtgaaagggcggggcatgcaaattcgaaatgaaagcccgggaacgccggaagaagcacgggtgtaagatttcccttttcaaaggcagagaataagaaatcagcccgagagtgtaagggcgtcaatagcgctgtggacgagacagagggaatggggcaaggagcgaggctggggctctcaccgcgacttgaatgtggatgagagtgggacggtgacggcgggcgcgaaggcgagcgcaatgatagggacttagggtgatagaagtgcaaagcatgactgtcaaatttttggagcaggttttctgacttcggtcggaaaacccctatttttgtggtgctaaaagttagattgcattccgcccttctcacgtctctttacgtgttgtttgcgaggcgtggcctcggaggtaaatggtctccttttacctcagataagcttacctttgctctgtgagtaagaatgtagctacacttccaaatttagctattgtcctttgcggtccaaatgaaaatattaccttccgatctaacaatgttaaactagtcccaggcccttctatcgattgccagaatagactagactactacacagacacaccctctcaaatcaggccagctcctgcaacctgcacctacagtttgtcccctgggacaaatgaaaggacaggccctctttcccccccccccccaaatcagagcacacacagatcttggggtctggggcagaaatttcgttcatggaaaaaacaaacaaacaaacaaacacgatcaaaggaagctcgttccctttggcctcagggtttcttagacgccgtgttccc

SEQ ID NO: 452 - DNA, 1084 bp, synthetic construct
  source 1..1084: mol_type = other DNA
tctccccgcccgcgggcggcgaagtaaaggcccagcgcagcccgcgctcctgccctggagcctcgtctttctccaggaaaacgtggaccgctctccgccgacaggtctcttccacagacccctgtcgccttcgcccccggtctcttccggttctgtcttttcgctggctcgatacgaacaaggaagtcgcccccagcggagccccggctcccccaggcagaggcggccccgggggcggagtcaacggcggaggccacgccctctgtgaaagggcggggcatgcaaattcgaaatgaaagcccgggaacgccggaagaagcacgggtgtaagatttcccttttcaaaggcagagaataagaaatcagcccgagagtgtaagggcgtcaatagcgctgtggacgagacagagggaatggggcaaggagcgaggctggggctctcaccgcgacttgaatgtggatgagagtgggacggtgacggcgggcgcgaaggcgagcgcaatgatagggacttagggtgatagaagtgcaaagcatgactgtcaaatttttggagcaggttttctgacttcggtcggaaaacccctataactggtaaccaaaagcagattactttcccccttgtggtcttcgcgtttgcggacgggagagaactttcggccattttccttttagaaatttaacttcttgaaggccaccaggtgacccttacttccctctcacctttccttctacctgtactttctctattaaaaagcctgcagaagtacccttgacaaattgccaaaaatgacacctaaaaaaaaaaaaaggaaaaacgacaccttaggtaattataggttgtaagaaaaagatttgacctcttggagtttttatttcttaataccaaaggacacccaaggaacgtatctctcaaaattgggtttcaaacctcagccgtttccttcttagttccagtgcttaacacgcaacagacctgcacaccactacactgcatacgagttttaaagttaataaatcagtcacccctccatagtcttctacctacttgaagacagaaacggctgctaggaagcaattcttc

SEQ ID NO: 453 - DNA, 1087 bp, synthetic construct
  source 1..1087: mol_type = other DNA
tctccccgcccgcgggcggcgaagtaaaggcccagcgcagcccgcgctcctgccctggagcctcgtctttctccaggaaaacgtggaccgctctccgccgacaggtctcttccacagacccctgtcgccttcgcccccggtctcttccggttctgtcttttcgctggctcgatacgaacaaggaagtcgcccccagcggagccccggctcccccaggcagaggcggccccgggggcggagtcaacggcggaggccacgccctctgtgaaagggcggggcatgcaaattcgaaatgaaagcccgggaacgccggaagaagcacgggtgtaagatttcccttttcaaaggcagagaataagaaatcagcccgagagtgtaagggcgtcaatagcgctgtggacgagacagagggaatggggcaaggagcgaggctggggctctcaccgcgacttgaatgtggatgagagtgggacggtgacggcgggcgcgaaggcgagcgcaatgatagggacttagggtgatagaagtgcaaagcatgactgtcaaatttttggagcaggttttctgacttcggtcggaaaacccctctggggaataagagtggtttaaagaaagaacaatttgagagatctgcttagatctaataaaacccaagtatagtttctttagacgtcttatatctcacgtaggacctcttatttcagactcactgcaagaacaagctaaagaactatatacagtcaggaacaaggtgagccatcgcggttctcagtcccatgatcttaagagtttttcctcttcccctcttccctggctgtcctggagctcactctgtagaccaggctggtctcaaactcagaaatccacttacctctgcctcccaagggctgggattaaaggcatgcaccaccattgcccggcagggtatgtggactatgctgtccttcaactcagagatcgtggtactttaaatctcattttccgaaagaaaagaaaagaaaggaaggggggaaataaagccagtatattttgcacccacaatctgaagttctacaaatattgttagaaaatgcaaaggacccaagtc

SEQ ID NO: 454 - DNA, 1087 bp, synthetic construct
  source 1..1087: mol_type = other DNA
tctccccgcccgcgggcggcgaagtaaaggcccagcgcagcccgcgctcctgccctggagcctcgtctttctccaggaaaacgtggaccgctctccgccgacaggtctcttccacagacccctgtcgccttcgcccccggtctcttccggttctgtcttttcgctggctcgatacgaacaaggaagtcgcccccagcggagccccggctcccccaggcagaggcggccccgggggcggagtcaacggcggaggccacgccctctgtgaaagggcggggcatgcaaattcgaaatgaaagcccgggaacgccggaagaagcacgggtgtaagatttcccttttcaaaggcagagaataagaaatcagcccgagagtgtaagggcgtcaatagcgctgtggacgagacagagggaatggggcaaggagcgaggctggggctctcaccgcgacttgaatgtggatgagagtgggacggtgacggcgggcgcgaaggcgagcgcaatgatagggacttagggtgatagaagtgcaaagcatgactgtcaaatttttggagcaggttttctgacttcggtcggaaaacccctctcggtttatcttaaagggttttaaatatagaaagcttccttagtcttatgggtgagagtgctgtttaagccttacctaggtatgtctttgaacatttattacagattgttatttgtgactatgaccactcaggtgttctgttcttgtgaatttagacacactcagaaaggctacacactcaaagaccacaccaaagtgaagtactatctgggccgtgaaactggtcacatatcagttattttgcagtaaaacaaggaagtcaatcatactgcttcagtgggtcagggagtcaagaatgcacagtacaagagctggtgagattcctcagcaggtaagagcactgaatgctcttccaaagattctgagttcaaatcccagcaaccacgtggtggatttgaacaaaggatgaaaacaaccatccataaccagatctgatgccctcttctggagtgtcaaaagacagctatggtgtacttacataaataaataagtaaaaaca

SEQ ID NO: 455 - DNA, 1087 bp, synthetic construct
  source 1..1087: mol_type = other DNA
tctccccgcccgcgggcggcgaagtaaaggcccagcgcagcccgcgctcctgccctggagcctcgtctttctccaggaaaacgtggaccgctctccgccgacaggtctcttccacagacccctgtcgccttcgcccccggtctcttccggttctgtcttttcgctggctcgatacgaacaaggaagtcgcccccagcggagccccggctcccccaggcagaggcggccccgggggcggagtcaacggcggaggccacgccctctgtgaaagggcggggcatgcaaattcgaaatgaaagcccgggaacgccggaagaagcacgggtgtaagatttcccttttcaaaggcagagaataagaaatcagcccgagagtgtaagggcgtcaatagcgctgtggacgagacagagggaatggggcaaggagcgaggctggggctctcaccgcgacttgaatgtggatgagagtgggacggtgacggcgggcgcgaaggcgagcgcaatgatagggacttagggtgatagaagtgcaaagcatgactgtcaaatttttggagcaggttttctgacttcggtcggaaaacccctccacattttgtgtttaaaaatagaaatatttaagtgagatcagtttaaatctgctttatctagggtgtctaactgcttgcatctttttaacttttccttatttgtgagaaggtctgtaaaacttattatatgttagtacactgtagctgtcttcagacactccagaagagggattcagatcaccttacagatggttttgagccaccatgtggttgctgggatttgaactcaggacctttagaaaagtagttgggtgctcttacccgctgagccatctcaccagccctttttttttcttttttccagttcgggtttctctgtgtgtagccctggctgtcctggaactcattctgtagaccgggctggcctcgaactcagaaatctgcctgcctctgcctcccaagtgctgggattaaaggaatgtgccttcattgcccggctctagggctttttgttgttgtttgtttgtttgtttgtttgtttgcttttgtggatggcct

SEQ ID NO: 456 - DNA, 1087 bp, synthetic construct
  source 1..1087: mol_type = other DNA
tctccccgcccgcgggcggcgaagtaaaggcccagcgcagcccgcgctcctgccctggagcctcgtctttctccaggaaaacgtggaccgctctccgccgacaggtctcttccacagacccctgtcgccttcgcccccggtctcttccggttctgtcttttcgctggctcgatacgaacaaggaagtcgcccccagcggagccccggctcccccaggcagaggcggccccgggggcggagtcaacggcggaggccacgccctctgtgaaagggcggggcatgcaaattcgaaatgaaagcccgggaacgccggaagaagcacgggtgtaagatttcccttttcaaaggcagagaataagaaatcagcccgagagtgtaagggcgtcaatagcgctgtggacgagacagagggaatggggcaaggagcgaggctggggctctcaccgcgacttgaatgtggatgagagtgggacggtgacggcgggcgcgaaggcgagcgcaatgatagggacttagggtgatagaagtgcaaagcatgactgtcaaatttttggagcaggttttctgacttcggtcggaaaacccctaaaaccagtaagggagaaaggtcaagtaacatataaaggaaggcctatcagaattacaccagacttttcaccagagactatgaaagccagaagagcctggacagatgttatacagacactaagagaacacaaatgccagcccaggctactatacctggccaaactctcaattaccatagatggagaaaccaaagtattccacgacaaaaacaaattcacacaatatctttccacgaatccagcccttcaaaggataatgacagaaaagaagcaatacaaggacggaaatcacgccctagaacaaccaagaaactaatcattcaacaaaccaaaaagaagacagccacaagaacagaatgccaactctaacaacaaaaataaaaggaagcaacaattacttttccttaatatctcttaatatcaatggactcaattccccaataaaaagacatagactaacagactggctacacaaacaggacccaacattctgctgctta

SEQ ID NO: 457 - DNA, 1087 bp, synthetic construct
  source 1..1087: mol_type = other DNA
tctccccgcccgcgggcggcgaagtaaaggcccagcgcagcccgcgctcctgccctggagcctcgtctttctccaggaaaacgtggaccgctctccgccgacaggtctcttccacagacccctgtcgccttcgcccccggtctcttccggttctgtcttttcgctggctcgatacgaacaaggaagtcgcccccagcggagccccggctcccccaggcagaggcggccccgggggcggagtcaacggcggaggccacgccctctgtgaaagggcggggcatgcaaattcgaaatgaaagcccgggaacgccggaagaagcacgggtgtaagatttcccttttcaaaggcagagaataagaaatcagcccgagagtgtaagggcgtcaatagcgctgtggacgagacagagggaatggggcaaggagcgaggctggggctctcaccgcgacttgaatgtggatgagagtgggacggtgacggcgggcgcgaaggcgagcgcaatgatagggacttagggtgatagaagtgcaaagcatgactgtcaaatttttggagcaggttttctgacttcggtcggaaaacccctcccaatttcactggtctacaatgaaagcaaaacagttctcttccccgctccccggtgtgtgagaggggctttgatccttctctggtttcctaggaaacgcgtatgtgctagagccacgctctgagacttccgcctcgtgcggtcccgcttcctttctgcctcctctggcctgcatccgtgggggaggtggctggctgcagggttctccggatctcttctgtgttcccactactcaagcaccgagtggcgttctatggcgtccgcctcggctcagcccgcggccctgagcgcggagcaggccaagggtgaggaaagagcctagtctgggtgtgggccgtcttctggggggagggcgcgatactattctttgcctctccaagtggggcccttgcccattagggcgaagggttgggaggacaagcttatcgggttgcttgcaggcctcggcccactaattccctgcctcttccctcctctgggctcgcccgccgtcctccgcg

SEQ ID NO: 458 - DNA, 1087 bp, synthetic construct
  source 1..1087: mol_type = other DNA
tctccccgcccgcgggcggcgaagtaaaggcccagcgcagcccgcgctcctgccctggagcctcgtctttctccaggaaaacgtggaccgctctccgccgacaggtctcttccacagacccctgtcgccttcgcccccggtctcttccggttctgtcttttcgctggctcgatacgaacaaggaagtcgcccccagcggagccccggctcccccaggcagaggcggccccgggggcggagtcaacggcggaggccacgccctctgtgaaagggcggggcatgcaaattcgaaatgaaagcccgggaacgccggaagaagcacgggtgtaagatttcccttttcaaaggcagagaataagaaatcagcccgagagtgtaagggcgtcaatagcgctgtggacgagacagagggaatggggcaaggagcgaggctggggctctcaccgcgacttgaatgtggatgagagtgggacggtgacggcgggcgcgaaggcgagcgcaatgatagggacttagggtgatagaagtgcaaagcatgactgtcaaatttttggagcaggttttctgacttcggtcggaaaacccctgaatttgttaaattacaggaggaagcttttttagttcattttacaaatactttcttgttaggtagataataccttctaaggttattatctggatcttctaagtctttttatcgctagcaagtctaagtttctggactttggaattagaagttaatgtcgtaggcgggcatggtggtccacgcctttaatcccagagtttgggaggcagacgcaggtggttttctgagttcgaggccatcctgctcttcaatgttagttccaggacagccagggttatacaaagaaaccctgtctcgagaaacaaaacaaacaaaaaaagagtagctgagtgctctgagttgtctctccagccccttagctatttattttcatttaaattatttttgttttattcgcttgtgtgcctgagtttgaatttcccgggattaacagttgaagactagggctggtgagatggctcagcggttaagattgccgactgctcttccaaaggtcctgag

SEQ ID NO: 459 - DNA, 1087 bp, synthetic construct
  source 1..1087: mol_type = other DNA
tctccccgcccgcgggcggcgaagtaaaggcccagcgcagcccgcgctcctgccctggagcctcgtctttctccaggaaaacgtggaccgctctccgccgacaggtctcttccacagacccctgtcgccttcgcccccggtctcttccggttctgtcttttcgctggctcgatacgaacaaggaagtcgcccccagcggagccccggctcccccaggcagaggcggccccgggggcggagtcaacggcggaggccacgccctctgtgaaagggcggggcatgcaaattcgaaatgaaagcccgggaacgccggaagaagcacgggtgtaagatttcccttttcaaaggcagagaataagaaatcagcccgagagtgtaagggcgtcaatagcgctgtggacgagacagagggaatggggcaaggagcgaggctggggctctcaccgcgacttgaatgtggatgagagtgggacggtgacggcgggcgcgaaggcgagcgcaatgatagggacttagggtgatagaagtgcaaagcatgactgtcaaatttttggagcaggttttctgacttcggtcggaaaacccctaccccctaattctacaagaatagaaagcttagcagctcctctgaatggttgctctcaggtgctagtggttgcaagtcgtatgttgatgcctgcctttgccctacctggtgtgtgagcgtgagcgcgccccacctctccagcctctctcttactgtttttcagacaagatgggactgttgttctcctactgctatgtacctcaatttcaattgatcatgcctggacataactgcccatgttgtaaggtcgtctacgttgtaaggtcgtgctcagtttctgatgcctagactagtcacctttccgtttgcctcctgactgtgtaaatgaggcaaatgaaggtggtctcttaactgacatgttagtgtttgacctatgggatagtttctcattgttgagacagaatttctagaagctggtccgctgagcggctaagagcacttgctgatattgcaaaggatctacctgggtttggttctcagcactcacatggaagttcacat

SEQ ID NO: 460 - DNA, 654 bp, synthetic construct
  source 1..654: mol_type = other DNA
tctccccgcccgcgggcggcgaagtaaaggcccagcgcagcccgcgctcctgccctggagcctcgtctttctccaggaaaacgtggaccgctctccgccgacaggtctcttccacagacccctgtcgccttcgcccccggtctcttccggttctgtcttttcgctggctcgatacgaacaaggaagtcgcccccagcggagccccggctcccccaggcagaggcggccccgggggcggagtcaacggcggaggccacgccctctgtgaaagggcggggcatgcaaattcgaaatgaaagcccgggaacgccggaagaagcacgggtgtaagatttcccttttcaaaggcagagaataagaaatcagcccgagagtgtaagggcgtcaatagcgctgtggacgagacagagggaatggggcaaggagcgaggctggggctctcaccgcgacttgaatgtggatgagagtgggacggtgacggcgggcgcgaaggcgagcgcaatgatagggacttagggtgatagaagtgcaaagcatgactgtcaaatttttggagcaggttttctgacttcggtcggaaaaccccttgtagttcctgcaatttaattttcgtttaaaactttattttattctttaacttaaaaaaaatatata

SEQ ID NO: 461 - DNA, 533 bp, synthetic construct; identical to SEQ ID NO: 365
  source 1..533: mol_type = other DNA

SEQ ID NO: 462 - DNA, 559 bp, synthetic construct; identical to SEQ ID NO: 366
  source 1..559: mol_type = other DNA

SEQ ID NO: 463 - DNA, 539 bp, synthetic construct; identical to SEQ ID NO: 367
  source 1..539: mol_type = other DNA

SEQ ID NO: 464 - DNA, 533 bp, synthetic construct; identical to SEQ ID NO: 368
  source 1..533: mol_type = other DNA

SEQ ID NO: 465 - DNA, 1087 bp, synthetic construct
  source 1..1087: mol_type = other DNA
ccaacaagagagaccctcatctctacaaaatattttttaaaataactgggcctcatggtgcattcctgtaatctgagctagttgggaggatagctagagcccaggagatcgaggctgcagagaaccgtgatcacacgactgcactccagcctgggtgacagagcaagaccctgtctcaatagatagatagatagatagatagatagatagatagatagatagatagataaaaacagagaggtgaaaaatatggttttaagggttctgtttaagaatactctgttccaacatggagtttgtcaactctaaagtggtaaaaaacaagacagattgtagacattttcataaaaggcaggattatttggtgtcaccaaattaaatatgttaatggtcacagcggaggccgactcaatcagccttttattctgccaggctatttgatactgctgagggcttacctatttcctgaggagaaaaatagtcattaaaatgaccttataaatgatagggacttagggtgatagaagtgcaaagcatgactgtcaaatttttggagcaggttttctgacttcggtcggaaaacccctactttctggagtttcaaaaacagactgtacgccaagggtcatatctttttttgtattggtttgtgtcttggttggtgtcttaggtgttaatcctacagtggagggtttatgggaataggaagtaacatgtcgcctgcatgtcataggagaaaaagcgagcatcagccgtatcggctttgtaacacaaattagctatcgtgaagtccgctcagctcttccctttctaccctggctgctttttgcagggattggtccgtggtctccagtctcttgggttctcaccctgtgtgaaaatcttcgtgtttttccctaccccccagtcacctcttacacagcctctgcttccaagcgcagcccccacaggagtttgtaggatttctgtgctagcggggaatgtgttctcacctcatagagccaggtagaaattatgcagatgggcagttctctgggaagaaagcagggcctttggggctctcagtgtccccgttgggttgtagaca

SEQ ID NO: 466 - DNA, 1087 bp, synthetic construct
  source 1..1087: mol_type = other DNA
ccaacaagagagaccctcatctctacaaaatattttttaaaataactgggcctcatggtgcattcctgtaatctgagctagttgggaggatagctagagcccaggagatcgaggctgcagagaaccgtgatcacacgactgcactccagcctgggtgacagagcaagaccctgtctcaatagatagatagatagatagatagatagatagatagatagatagatagataaaaacagagaggtgaaaaatatggttttaagggttctgtttaagaatactctgttccaacatggagtttgtcaactctaaagtggtaaaaaacaagacagattgtagacattttcataaaaggcaggattatttggtgtcaccaaattaaatatgttaatggtcacagcggaggccgactcaatcagccttttattctgccaggctatttgatactgctgagggcttacctatttcctgaggagaaaaatagtcattaaaatgaccttataaatgatagggacttagggtgatagaagtgcaaagcatgactgtcaaatttttggagcaggttttctgacttcggtcggaaaacccctactttctggagtttctaaaagtagactgtacgctaagggtcatatctttttttgttttggtttgtgtcttggttggcgtcttaaatgttaatcctacagtggagggctggcgaataggaagtaacatgtcgcctgcacgccataggagaaaaagcgagcatcagccgtatcggctttgtaacacaaattagctatcgtgaagtccgctcagctcttccctttctaccctggctgctttttgcagggattggtccgtggtctccagtctcttgggttctcaccctgtgtgaaaatcttcctgtttttccctaccccccaagtcacctcttacacagcctctgcttccaagcgcagcccccacaggagtttgtaggatttctgtgctagcggggagtgtgttctcacctcatagagccaggtagaaactacgcagatgggtgctgttctccaggaagaaagcagggcctttggggctctcagtgtccccgttgggttgtaga

SEQ ID NO: 467 - DNA, 1087 bp, synthetic construct
  source 1..1087: mol_type = other DNA
ccaacaagagagaccctcatctctacaaaatattttttaaaataactgggcctcatggtgcattcctgtaatctgagctagttgggaggatagctagagcccaggagatcgaggctgcagagaaccgtgatcacacgactgcactccagcctgggtgacagagcaagaccctgtctcaatagatagatagatagatagatagatagatagatagatagatagatagataaaaacagagaggtgaaaaatatggttttaagggttctgtttaagaatactctgttccaacatggagtttgtcaactctaaagtggtaaaaaacaagacagattgtagacattttcataaaaggcaggattatttggtgtcaccaaattaaatatgttaatggtcacagcggaggccgactcaatcagccttttattctgccaggctatttgatactgctgagggcttacctatttcctgaggagaaaaatagtcattaaaatgaccttataaatgatagggacttagggtgatagaagtgcaaagcatgactgtcaaatttttggagcaggttttctgacttcggtcggaaaacccctactttctggagtttcaaaaacagaccgtacgccaagggtcatgtcttttttcgtattggtttgtgtcttagttgttaatcctacagtggaggcctggggaataagaagtaacatgtggcctgcacgccataggagaaaaagcgagcatcagccgtatcggctttgtaacacaaattagctatcgtgaagtccgctcagctcttccatttctaccctggctgctttttgcagggattggtccgtggtctccagtctcttgggttctcaccctgtgtgaaaatcttcgtgtttttccctaccccccaagtcacctcttacacagcctctgcttccaagcgcagcccccacaggagtttgtaggatttctgtgctagcggggagtgtgttctcacctcatagagccaggtagaaattatgcagatgggcgctgttctctgggaagaaagcagggcctttggggctctcagtgtccccgttgggttgtagacataacactctta

SEQ ID NO: 468 - DNA, 891 bp, synthetic construct
  source 1..891: mol_type = other DNA
ccaacaagagagaccctcatctctacaaaatattttttaaaataactgggcctcatggtgcattcctgtaatctgagctagttgggaggatagctagagcccaggagatcgaggctgcagagaaccgtgatcacacgactgcactccagcctgggtgacagagcaagaccctgtctcaatagatagatagatagatagatagatagatagatagatagatagatagataaaaacagagaggtgaaaaatatggttttaagggttctgtttaagaatactctgttccaacatggagtttgtcaactctaaagtggtaaaaaacaagacagattgtagacattttcataaaaggcaggattatttggtgtcaccaaattaaatatgttaatggtcacagcggaggccgactcaatcagccttttattctgccaggctatttgatactgctgagggcttacctatttcctgaggagaaaaatagtcattaaaatgaccttataaatgatagggacttagggtgatagaagtgcaaagcatgactgtcaaatttttggagcaggttttctgacttcggtcggaaaacccctcctccggggatacaacgtgtttcctaaaagtagagggaggtaagagacggtagcacctgcggggcggcttgcacgccgagtgcctgtgacgcgccggcttaacttaactgcttccctgaagtaccttgaggttcctgatgtgcgggcggtagacggtaggcttatgcggcacgctgtcgtttccaccgtggctactgcgctttgggaaggccacgacctcctcctttggggaggtccttaggatctcagcttggcagtcgagtgggtggcgaccttttaaaggaatgggacccacccggagttc

SEQ ID NO: 469 - DNA, 1079 bp, synthetic construct
  source 1..1079: mol_type = other DNA
ccaacaagagagaccctcatctctacaaaatattttttaaaataactgggcctcatggtgcattcctgtaatctgagctagttgggaggatagctagagcccaggagatcgaggctgcagagaaccgtgatcacacgactgcactccagcctgggtgacagagcaagaccctgtctcaatagatagatagatagatagatagatagatagatagatagatagatagataaaaacagagaggtgaaaaatatggttttaagggttctgtttaagaatactctgttccaacatggagtttgtcaactctaaagtggtaaaaaacaagacagattgtagacattttcataaaaggcaggattatttggtgtcaccaaattaaatatgttaatggtcacagcggaggccgactcaatcagccttttattctgccaggctatttgatactgctgagggcttacctatttcctgaggagaaaaatagtcattaaaatgaccttataaatgatagggacttagggtgatagaagtgcaaagcatgactgtcaaatttttggagcaggttttctgacttcggtcggaaaacccctttcccttcttgtaatacaaaataataacaaccacagaggacatcgcaagtaaaatgtgtataacaaccccatctaaagaaccctatcatctttctactatctgtctacctaaatatgtatagtataaataaccctatatagcactctaagcaacttaagttaggtaacttagaaaactcttttttttttttgagactgagtctcactctgtcgcacccaggctggagtgcagtggcgtgatctcggctcactgcaacctccaccttctgggttcaagtgattctcccatctcagtctcccaagtagctgggattacaggcacgccaccatgccctgctacatttttttttttttagtagagatgaggtttcaccacattggccaggctgttctcgaactcctgacctcaggtgatccgcccaccttggcctcatgaagtgctgggattacaggtgtgagccactgtacccagccagaaaactcttaaaaaac

SEQ ID NO: 470 - DNA, 969 bp, synthetic construct
  source 1..969: mol_type = other DNA
ccaacaagagagaccctcatctctacaaaatattttttaaaataactgggcctcatggtgcattcctgtaatctgagctagttgggaggatagctagagcccaggagatcgaggctgcagagaaccgtgatcacacgactgcactccagcctgggtgacagagcaagaccctgtctcaatagatagatagatagatagatagatagatagatagatagatagatagataaaaacagagaggtgaaaaatatggttttaagggttctgtttaagaatactctgttccaacatggagtttgtcaactctaaagtggtaaaaaacaagacagattgtagacattttcataaaaggcaggattatttggtgtcaccaaattaaatatgttaatggtcacagcggaggccgactcaatcagccttttattctgccaggctatttgatactgctgagggcttacctatttcctgaggagaaaaatagtcattaaaatgaccttataaatgatagggacttagggtgatagaagtgcaaagcatgactgtcaaatttttggagcaggttttctgacttcggtcggaaaacccctctgaattttcttgcagttgaacaacagaggctttttttgtgtgtgtgggggtgcttggttttgggaggttgaagagtacttgttcgcaaactctctaaatgagagatggggaagtgtcttaccagctgattcgcgagagcacctgcaagtttacctgttttagtgatttgcgtttatgaaagttggagttgctgattttgtgatctctacttttaaggtaaaagcagggcggtgttgacttttcttgccagttggctgtcctgttttctttctcgcactgttttctttttgagacgaagtctgtcgctcaggctggagtgcactggcgtgatctcggctcgctgcaaactttgccgaacccctgtttagcgatttccgtttg

SEQ ID NO: 471 - DNA, 1087 bp, synthetic construct
  source 1..1087: mol_type = other DNA
ccaacaagagagaccctcatctctacaaaatattttttaaaataactgggcctcatggtgcattcctgtaatctgagctagttgggaggatagctagagcccaggagatcgaggctgcagagaaccgtgatcacacgactgcactccagcctgggtgacagagcaagaccctgtctcaatagatagatagatagatagatagatagatagatagatagatagatagataaaaacagagaggtgaaaaatatggttttaagggttctgtttaagaatactctgttccaacatggagtttgtcaactctaaagtggtaaaaaacaagacagattgtagacattttcataaaaggcaggattatttggtgtcaccaaattaaatatgttaatggtcacagcggaggccgactcaatcagccttttattctgccaggctatttgatactgctgagggcttacctatttcctgaggagaaaaatagtcattaaaatgaccttataaatgatagggacttagggtgatagaagtgcaaagcatgactgtcaaatttttggagcaggttttctgacttcggtcggaaaacccctatatgtggtaatccaacaatagaaattatttttaagtttgtgtgttcctttttctgttcaatggtgcttttgatattgttgtaaagcagtgactagcagattctgtgtggtaaaagcactgaaccctgtttagttcttttctccctaccttattggtaattatttctgtgtatatatgttccaaagaaatgcggcttgtatattcatgcttttcaactttttgtgatagacagttgatacacaagtagtacctcctccgggatcttcttagtcaagactgtttggtagatgcatgttttttgttacttgtaatgtacagtattcagttcattttctttttgcagcactgtccggttgaaacacaacgcgaggatcgggcgtggtggctcacgcctgtaatcccagcactttgggaggccgaggcaggacaatcaagaccaatcctggtcatcaaggcaggagaatcaagaccatcgaggtcaggagatcaagaccatcct

SEQ ID NO: 472 - DNA, 1085 bp, synthetic construct
  source 1..1085: mol_type = other DNA
ccaacaagagagaccctcatctctacaaaatattttttaaaataactgggcctcatggtgcattcctgtaatctgagctagttgggaggatagctagagcccaggagatcgaggctgcagagaaccgtgatcacacgactgcactccagcctgggtgacagagcaagaccctgtctcaatagatagatagatagatagatagatagatagatagatagatagatagataaaaacagagaggtgaaaaatatggttttaagggttctgtttaagaatactctgttccaacatggagtttgtcaactctaaagtggtaaaaaacaagacagattgtagacattttcataaaaggcaggattatttggtgtcaccaaattaaatatgttaatggtcacagcggaggccgactcaatcagccttttattctgccaggctatttgatactgctgagggcttacctatttcctgaggagaaaaatagtcattaaaatgaccttataaatgatagggacttagggtgatagaagtgcaaagcatgactgtcaaatttttggagcaggttttctgacttcggtcggaaaacccctacatcaggttgtttttctgtttttacatcaggttgtttttctgtttggttttttttttacaccacgtttatacgccggtgcacggtttaccactgaaaacacctttcatctacaggtgatatcttttaacacaaataaaatgtagtagtcctaggagacggaatagaaggaggtggggcctaggcagattcatctctgcggtgcattttgcctctggccctcgggccctagtttgcgatctttcccatcttgcctctgcttccctctgcacaatcctgagtattgcagtaccttacacttaaggaaatttcgtcttgccaaagttgatccatttcagctccgaaacataacaggaactagtgcaacgataaacgtatgaggaacttgcaataagagtgacagaatcctttgaatcaaaaaaaaaaaaagccaccacttaatgagtatctaccatatgtcaagggcttcaccaatatttcattgaaatattccagacca

SEQ ID NO: 473 - DNA, 1087 bp, synthetic construct
  source 1..1087: mol_type = other DNA
ccaacaagagagaccctcatctctacaaaatattttttaaaataactgggcctcatggtgcattcctgtaatctgagctagttgggaggatagctagagcccaggagatcgaggctgcagagaaccgtgatcacacgactgcactccagcctgggtgacagagcaagaccctgtctcaatagatagatagatagatagatagatagatagatagatagatagatagataaaaacagagaggtgaaaaatatggttttaagggttctgtttaagaatactctgttccaacatggagtttgtcaactctaaagtggtaaaaaacaagacagattgtagacattttcataaaaggcaggattatttggtgtcaccaaattaaatatgttaatggtcacagcggaggccgactcaatcagccttttattctgccaggctatttgatactgctgagggcttacctatttcctgaggagaaaaatagtcattaaaatgaccttataaatgatagggacttagggtgatagaagtgcaaagcatgactgtcaaatttttggagcaggttttctgacttcggtcggaaaacccctcttatgatgtttgttgccaatgatagattgttttcactgtgcaaaaattatgggtagttttggtggtcttgatgcagttgtaagcttggggtatgaaggtttgggccacgcctgggcgcttccggctgcgccggatgctgtttcctttccgctcccaggggcgttgggaacggttgtaggacgtggctctttattcgtgagttttccatttacctccgctgaacctagagcttcagacgccctatggcgtccgcctcgacccaaccggcggccttgagcgctgagcaagcaaagggtgagaatcgtcctagtcaaggcataggctgctggcctggggtagtcaaggcatgggctgctggtctggggaggatgcgggcggaggatgtggggcgacaaacctggctacgtccgccgggaaaatggggtaggggacgccgggtaccgtccttctaagtggggcgcttgcccccaagacttgggatcttattgggttacctaca

SEQ ID NO: 474 - DNA, 1085 bp, synthetic construct
  source 1..1085: mol_type = other DNA
ccaacaagagagaccctcatctctacaaaatattttttaaaataactgggcctcatggtgcattcctgtaatctgagctagttgggaggatagctagagcccaggagatcgaggctgcagagaaccgtgatcacacgactgcactccagcctgggtgacagagcaagaccctgtctcaatagatagatagatagatagatagatagatagatagatagatagatagataaaaacagagaggtgaaaaatatggttttaagggttctgtttaagaatactctgttccaacatggagtttgtcaactctaaagtggtaaaaaacaagacagattgtagacattttcataaaaggcaggattatttggtgtcaccaaattaaatatgttaatggtcacagcggaggccgactcaatcagccttttattctgccaggctatttgatactgctgagggcttacctatttcctgaggagaaaaatagtcattaaaatgaccttataaatgatagggacttagggtgatagaagtgcaaagcatgactgtcaaatttttggagcaggttttctgacttcggtcggaaaaccccttctttactgttatatgttaggcgaaatattacgcgtttggagtaagtggtgctttttgtaactgaaaagagattctgtgtgtgtttttttttttttagaggctgcatagttatttgtatgaaccgcaggtgacctaattagcaaggtaattcagacctgtatcctagcacttaagaagtggaagtgggataaccctgcgtgttctcgtgtgggaggctagcttaagcaacaaagcaggaaggccccaccaacaaaagaatttaaaaattatacgtgcgtggtggcgcgcgtatgaggaaattatttggcaactgtgttacagtatagcagcaaatggaatagacctagtccctgactttaggagacctgcctcagccccccgaatggctgggactacaggcgtgcgcctccgcgcccagctaatttttgcatttttggtagagacgggttcaccatgttggccaggatggtctccatctcttcatctggtgatccgcc

SEQ ID NO: 475 - DNA, 1087 bp, synthetic construct
  source 1..1087: mol_type = other DNA
ccaacaagagagaccctcatctctacaaaatattttttaaaataactgggcctcatggtgcattcctgtaatctgagctagttgggaggatagctagagcccaggagatcgaggctgcagagaaccgtgatcacacgactgcactccagcctgggtgacagagcaagaccctgtctcaatagatagatagatagatagatagatagatagatagatagatagatagataaaaacagagaggtgaaaaatatggttttaagggttctgtttaagaatactctgttccaacatggagtttgtcaactctaaagtggtaaaaaacaagacagattgtagacattttcataaaaggcaggattatttggtgtcaccaaattaaatatgttaatggtcacagcggaggccgactcaatcagccttttattctgccaggctatttgatactgctgagggcttacctatttcctgaggagaaaaatagtcattaaaatgaccttataaatgatagggacttagggtgatagaagtgcaaagcatgactgtcaaatttttggagcaggttttctgacttcggtcggaaaacccctaccttattcacgcctaaaaagtagactgactgtggggtggtcgtgttttttgtttcttgttggtaggtggtgaatgcgtttttttcgttgttttctccgttactcaggctgccagttgcttggcagtcttgtcgctggctgtggacgctctgcacttcatcaccgtccccagctgcgctttgagccggtctaaggttgcccacagtattgacgttgggacccacgaaactggcaatttccatgtgtgcggccttacccagttctcccaaacttctgcgtataaccgcttctctgtgcttcagaaagataagtccggccccggcctcacacagcagctcagttcgtgacagcgtttaatatgtaaaatggagcaaataatttatagggcgttgggagagttaaagagactaattcatttacgtgttaaatacagggaatggcttttgcattgatataaccccagcctccagcatgcgccagacctgacgtaggtgttcggc

SEQ ID NO: 476 - DNA, 1087 bp, synthetic construct
  source 1..1087: mol_type = other DNA
ccaacaagagagaccctcatctctacaaaatattttttaaaataactgggcctcatggtgcattcctgtaatctgagctagttgggaggatagctagagcccaggagatcgaggctgcagagaaccgtgatcacacgactgcactccagcctgggtgacagagcaagaccctgtctcaatagatagatagatagatagatagatagatagatagatagatagatagataaaaacagagaggtgaaaaatatggttttaagggttctgtttaagaatactctgttccaacatggagtttgtcaactctaaagtggtaaaaaacaagacagattgtagacattttcataaaaggcaggattatttggtgtcaccaaattaaatatgttaatggtcacagcggaggccgactcaatcagccttttattctgccaggctatttgatactgctgagggcttacctatttcctgaggagaaaaatagtcattaaaatgaccttataaatgatagggacttagggtgatagaagtgcaaagcatgactgtcaaatttttggagcaggttttctgacttcggtcggaaaaccccttttgacccattacccatctaagttagatgcttttttaaatgttttttaatttttaaatttttaatttttttcattatttattttttatttttgagacggatctcggctcactgtaacctccacctcccgggttcaagcgattctcctgactcagcctcccgagtagctgggattacaggcgcgcgccaccatgcccggctaatttttctatttttagtaaagacggggtttcgccatgttgaccagggtggtcttgaactcctgacgtcaggtgatcctcctgcctcgtgctgggattgcaggcgtgagccaccgctcccggcccttagatgctttttaatcagcaagtacgcaatgctttcctgacaggaatgtcaagtccgtcaggaaatccacataagggtgttaagcaggcaaagtaccacatacagattaaaatcaaaagcactgtcaacgcttatttaatttatacagtagaccctaacttttctaattttgtg

SEQ ID NO: 477 - DNA, 1087 bp, synthetic construct
  source 1..1087: mol_type = other DNA
ccaacaagagagaccctcatctctacaaaatattttttaaaataactgggcctcatggtgcattcctgtaatctgagctagttgggaggatagctagagcccaggagatcgaggctgcagagaaccgtgatcacacgactgcactccagcctgggtgacagagcaagaccctgtctcaatagatagatagatagatagatagatagatagatagatagatagatagataaaaacagagaggtgaaaaatatggttttaagggttctgtttaagaatactctgttccaacatggagtttgtcaactctaaagtggtaaaaaacaagacagattgtagacattttcataaaaggcaggattatttggtgtcaccaaattaaatatgttaatggtcacagcggaggccgactcaatcagccttttattctgccaggctatttgatactgctgagggcttacctatttcctgaggagaaaaatagtcattaaaatgaccttataaatgatagggacttagggtgatagaagtgcaaagcatgactgtcaaatttttggagcaggttttctgacttcggtcggaaaacccctgtttacttggttttaaaaatagcttgcactagcgataccgcgaatatggttattaggtttgttaggcacagtcgtgtcttactatagaaaaataacgtagtgttcattttgctgcctgtatgtgttaatttgtccttattgcgccattgttcttgttaagtcttctgtaaggagttgcgggtttcaaactgtcagtctgagagcataagctcacttttcagtcagttgaattgaatgttacattcgattggttctggatattgatattacccaaggcttgtcctgtttgtaagtcttttcctacacctgacaatatgattatgtttacaatgtccctagaactctgggtgtatcgttcccactgaataaaatttgatctctaagttgacctataaatttaagtaccaaaaaactggtttgtaagattttggaaggcagaggcagggaagagaccaacgtggtctacatataaagtaccaggtacatataaagtaccaggt

SEQ ID NO: 478 - DNA, 1083 bp, synthetic construct
  source 1..1083: mol_type = other DNA
ccaacaagagagaccctcatctctacaaaatattttttaaaataactgggcctcatggtgcattcctgtaatctgagctagttgggaggatagctagagcccaggagatcgaggctgcagagaaccgtgatcacacgactgcactccagcctgggtgacagagcaagaccctgtctcaatagatagatagatagatagatagatagatagatagatagatagatagataaaaacagagaggtgaaaaatatggttttaagggttctgtttaagaatactctgttccaacatggagtttgtcaactctaaagtggtaaaaaacaagacagattgtagacattttcataaaaggcaggattatttggtgtcaccaaattaaatatgttaatggtcacagcggaggccgactcaatcagccttttattctgccaggctatttgatactgctgagggcttacctatttcctgaggagaaaaatagtcattaaaatgaccttataaatgatagggacttagggtgatagaagtgcaaagcatgactgtcaaatttttggagcaggttttctgacttcggtcggaaaacccctatttttgtggtgctaaaagttagattgcattccgcccttctcacgtctctttacgtgttgtttgcgaggcgtggcctcggaggtaaatggtctccttttacctcagataagcttacctttgctctgtgagtaagaatgtagctacacttccaaatttagctattgtcctttgcggtccaaatgaaaatattaccttccgatctaacaatgttaaactagtcccaggcccttctatcgattgccagaatagactagactactacacagacacaccctctcaaatcaggccagctcctgcaacctgcacctacagtttgtcccctgggacaaatgaaaggacaggccctctttcccccccccccccaaatcagagcacacacagatcttggggtctggggcagaaatttcgttcatggaaaaaacaaacaaacaaacaaacacgatcaaaggaagctcgttccctttggcctcagggtttcttagacgccgtgttccc

SEQ ID NO: 479 - DNA, 1084 bp, synthetic construct
  source 1..1084: mol_type = other DNA
ccaacaagagagaccctcatctctacaaaatattttttaaaataactgggcctcatggtgcattcctgtaatctgagctagttgggaggatagctagagcccaggagatcgaggctgcagagaaccgtgatcacacgactgcactccagcctgggtgacagagcaagaccctgtctcaatagatagatagatagatagatagatagatagatagatagatagatagataaaaacagagaggtgaaaaatatggttttaagggttctgtttaagaatactctgttccaacatggagtttgtcaactctaaagtggtaaaaaacaagacagattgtagacattttcataaaaggcaggattatttggtgtcaccaaattaaatatgttaatggtcacagcggaggccgactcaatcagccttttattctgccaggctatttgatactgctgagggcttacctatttcctgaggagaaaaatagtcattaaaatgaccttataaatgatagggacttagggtgatagaagtgcaaagcatgactgtcaaatttttggagcaggttttctgacttcggtcggaaaacccctataactggtaaccaaaagcagattactttcccccttgtggtcttcgcgtttgcggacgggagagaactttcggccattttccttttagaaatttaacttcttgaaggccaccaggtgacccttacttccctctcacctttccttctacctgtactttctctattaaaaagcctgcagaagtacccttgacaaattgccaaaaatgacacctaaaaaaaaaaaaaggaaaaacgacaccttaggtaattataggttgtaagaaaaagatttgacctcttggagtttttatttcttaataccaaaggacacccaaggaacgtatctctcaaaattgggtttcaaacctcagccgtttccttcttagttccagtgcttaacacgcaacagacctgcacaccactacactgcatacgagttttaaagttaataaatcagtcacccctccatagtcttctacctacttgaagacagaaacggctgctaggaagcaattcttc

SEQ ID NO: 480 - DNA, 1087 bp, synthetic construct
  source 1..1087: mol_type = other DNA
ccaacaagagagaccctcatctctacaaaatattttttaaaataactgggcctcatggtgcattcctgtaatctgagctagttgggaggatagctagagcccaggagatcgaggctgcagagaaccgtgatcacacgactgcactccagcctgggtgacagagcaagaccctgtctcaatagatagatagatagatagatagatagatagatagatagatagatagataaaaacagagaggtgaaaaatatggttttaagggttctgtttaagaatactctgttccaacatggagtttgtcaactctaaagtggtaaaaaacaagacagattgtagacattttcataaaaggcaggattatttggtgtcaccaaattaaatatgttaatggtcacagcggaggccgactcaatcagccttttattctgccaggctatttgatactgctgagggcttacctatttcctgaggagaaaaatagtcattaaaatgaccttataaatgatagggacttagggtgatagaagtgcaaagcatgactgtcaaatttttggagcaggttttctgacttcggtcggaaaacccctctggggaataagagtggtttaaagaaagaacaatttgagagatctgcttagatctaataaaacccaagtatagtttctttagacgtcttatatctcacgtaggacctcttatttcagactcactgcaagaacaagctaaagaactatatacagtcaggaacaaggtgagccatcgcggttctcagtcccatgatcttaagagtttttcctcttcccctcttccctggctgtcctggagctcactctgtagaccaggctggtctcaaactcagaaatccacttacctctgcctcccaagggctgggattaaaggcatgcaccaccattgcccggcagggtatgtggactatgctgtccttcaactcagagatcgtggtactttaaatctcattttccgaaagaaaagaaaagaaaggaaggggggaaataaagccagtatattttgcacccacaatctgaagttctacaaatattgttagaaaatgcaaaggacccaagtc

SEQ ID NO: 481 - DNA, 1087 bp, synthetic construct
  source 1..1087: mol_type = other DNA
ccaacaagagagaccctcatctctacaaaatattttttaaaataactgggcctcatggtgcattcctgtaatctgagctagttgggaggatagctagagcccaggagatcgaggctgcagagaaccgtgatcacacgactgcactccagcctgggtgacagagcaagaccctgtctcaatagatagatagatagatagatagatagatagatagatagatagatagataaaaacagagaggtgaaaaatatggttttaagggttctgtttaagaatactctgttccaacatggagtttgtcaactctaaagtggtaaaaaacaagacagattgtagacattttcataaaaggcaggattatttggtgtcaccaaattaaatatgttaatggtcacagcggaggccgactcaatcagccttttattctgccaggctatttgatactgctgagggcttacctatttcctgaggagaaaaatagtcattaaaatgaccttataaatgatagggacttagggtgatagaagtgcaaagcatgactgtcaaatttttggagcaggttttctgacttcggtcggaaaacccctctcggtttatcttaaagggttttaaatatagaaagcttccttagtcttatgggtgagagtgctgtttaagccttacctaggtatgtctttgaacatttattacagattgttatttgtgactatgaccactcaggtgttctgttcttgtgaatttagacacactcagaaaggctacacactcaaagaccacaccaaagtgaagtactatctgggccgtgaaactggtcacatatcagttattttgcagtaaaacaaggaagtcaatcatactgcttcagtgggtcagggagtcaagaatgcacagtacaagagctggtgagattcctcagcaggtaagagcactgaatgctcttccaaagattctgagttcaaatcccagcaaccacgtggtggatttgaacaaaggatgaaaacaaccatccataaccagatctgatgccctcttctggagtgtcaaaagacagctatggtgtacttacataaataaataagtaaaaaca

SEQ ID NO: 482 - DNA, 1087 bp, synthetic construct
  source 1..1087: mol_type = other DNA
ccaacaagagagaccctcatctctacaaaatattttttaaaataactgggcctcatggtgcattcctgtaatctgagctagttgggaggatagctagagcccaggagatcgaggctgcagagaaccgtgatcacacgactgcactccagcctgggtgacagagcaagaccctgtctcaatagatagatagatagatagatagatagatagatagatagatagatagataaaaacagagaggtgaaaaatatggttttaagggttctgtttaagaatactctgttccaacatggagtttgtcaactctaaagtggtaaaaaacaagacagattgtagacattttcataaaaggcaggattatttggtgtcaccaaattaaatatgttaatggtcacagcggaggccgactcaatcagccttttattctgccaggctatttgatactgctgagggcttacctatttcctgaggagaaaaatagtcattaaaatgaccttataaatgatagggacttagggtgatagaagtgcaaagcatgactgtcaaatttttggagcaggttttctgacttcggtcggaaaacccctccacattttgtgtttaaaaatagaaatatttaagtgagatcagtttaaatctgctttatctagggtgtctaactgcttgcatctttttaacttttccttatttgtgagaaggtctgtaaaacttattatatgttagtacactgtagctgtcttcagacactccagaagagggattcagatcaccttacagatggttttgagccaccatgtggttgctgggatttgaactcaggacctttagaaaagtagttgggtgctcttacccgctgagccatctcaccagccctttttttttcttttttccagttcgggtttctctgtgtgtagccctggctgtcctggaactcattctgtagaccgggctggcctcgaactcagaaatctgcctgcctctgcctcccaagtgctgggattaaaggaatgtgccttcattgcccggctctagggctttttgttgttgtttgtttgtttgtttgtttgtttgcttttgtggatggcct

SEQ ID NO: 483 - DNA, 1087 bp, synthetic construct
  source 1..1087: mol_type = other DNA
ccaacaagagagaccctcatctctacaaaatattttttaaaataactgggcctcatggtgcattcctgtaatctgagctagttgggaggatagctagagcccaggagatcgaggctgcagagaaccgtgatcacacgactgcactccagcctgggtgacagagcaagaccctgtctcaatagatagatagatagatagatagatagatagatagatagatagatagataaaaacagagaggtgaaaaatatggttttaagggttctgtttaagaatactctgttccaacatggagtttgtcaactctaaagtggtaaaaaacaagacagattgtagacattttcataaaaggcaggattatttggtgtcaccaaattaaatatgttaatggtcacagcggaggccgactcaatcagccttttattctgccaggctatttgatactgctgagggcttacctatttcctgaggagaaaaatagtcattaaaatgaccttataaatgatagggacttagggtgatagaagtgcaaagcatgactgtcaaatttttggagcaggttttctgacttcggtcggaaaacccctaaaaccagtaagggagaaaggtcaagtaacatataaaggaaggcctatcagaattacaccagacttttcaccagagactatgaaagccagaagagcctggacagatgttatacagacactaagagaacacaaatgccagcccaggctactatacctggccaaactctcaattaccatagatggagaaaccaaagtattccacgacaaaaacaaattcacacaatatctttccacgaatccagcccttcaaaggataatgacagaaaagaagcaatacaaggacggaaatcacgccctagaacaaccaagaaactaatcattcaacaaaccaaaaagaagacagccacaagaacagaatgccaactctaacaacaaaaataaaaggaagcaacaattacttttccttaatatctcttaatatcaatggactcaattccccaataaaaagacatagactaacagactggctacacaaacaggacccaacattctgctgctta

SEQ ID NO: 484 - DNA, 1087 bp, synthetic construct
  source 1..1087: mol_type = other DNA
ccaacaagagagaccctcatctctacaaaatattttttaaaataactgggcctcatggtgcattcctgtaatctgagctagttgggaggatagctagagcccaggagatcgaggctgcagagaaccgtgatcacacgactgcactccagcctgggtgacagagcaagaccctgtctcaatagatagatagatagatagatagatagatagatagatagatagatagataaaaacagagaggtgaaaaatatggttttaagggttctgtttaagaatactctgttccaacatggagtttgtcaactctaaagtggtaaaaaacaagacagattgtagacattttcataaaaggcaggattatttggtgtcaccaaattaaatatgttaatggtcacagcggaggccgactcaatcagccttttattctgccaggctatttgatactgctgagggcttacctatttcctgaggagaaaaatagtcattaaaatgaccttataaatgatagggacttagggtgatagaagtgcaaagcatgactgtcaaatttttggagcaggttttctgacttcggtcggaaaacccctcccaatttcactggtctacaatgaaagcaaaacagttctcttccccgctccccggtgtgtgagaggggctttgatccttctctggtttcctaggaaacgcgtatgtgctagagccacgctctgagacttccgcctcgtgcggtcccgcttcctttctgcctcctctggcctgcatccgtgggggaggtggctggctgcagggttctccggatctcttctgtgttcccactactcaagcaccgagtggcgttctatggcgtccgcctcggctcagcccgcggccctgagcgcggagcaggccaagggtgaggaaagagcctagtctgggtgtgggccgtcttctggggggagggcgcgatactattctttgcctctccaagtggggcccttgcccattagggcgaagggttgggaggacaagcttatcgggttgcttgcaggcctcggcccactaattccctgcctcttccctcctctgggctcgcccgccgtcctccgcg

SEQ ID NO: 485 - DNA, 1087 bp, synthetic construct
  source 1..1087: mol_type = other DNA
ccaacaagagagaccctcatctctacaaaatattttttaaaataactgggcctcatggtgcattcctgtaatctgagctagttgggaggatagctagagcccaggagatcgaggctgcagagaaccgtgatcacacgactgcactccagcctgggtgacagagcaagaccctgtctcaatagatagatagatagatagatagatagatagatagatagatagatagataaaaacagagaggtgaaaaatatggttttaagggttctgtttaagaatactctgttccaacatggagtttgtcaactctaaagtggtaaaaaacaagacagattgtagacattttcataaaaggcaggattatttggtgtcaccaaattaaatatgttaatggtcacagcggaggccgactcaatcagccttttattctgccaggctatttgatactgctgagggcttacctatttcctgaggagaaaaatagtcattaaaatgaccttataaatgatagggacttagggtgatagaagtgcaaagcatgactgtcaaatttttggagcaggttttctgacttcggtcggaaaacccctgaatttgttaaattacaggaggaagcttttttagttcattttacaaatactttcttgttaggtagataataccttctaaggttattatctggatcttctaagtctttttatcgctagcaagtctaagtttctggactttggaattagaagttaatgtcgtaggcgggcatggtggtccacgcctttaatcccagagtttgggaggcagacgcaggtggttttctgagttcgaggccatcctgctcttcaatgttagttccaggacagccagggttatacaaagaaaccctgtctcgagaaacaaaacaaacaaaaaaagagtagctgagtgctctgagttgtctctccagccccttagctatttattttcatttaaattatttttgttttattcgcttgtgtgcctgagtttgaatttcccgggattaacagttgaagactagggctggtgagatggctcagcggttaagattgccgactgctcttccaaaggtcctgag

SEQ ID NO: 486 - DNA, 1087 bp, synthetic construct
  source 1..1087: mol_type = other DNA
ccaacaagagagaccctcatctctacaaaatattttttaaaataactgggcctcatggtgcattcctgtaatctgagctagttgggaggatagctagagcccaggagatcgaggctgcagagaaccgtgatcacacgactgcactccagcctgggtgacagagcaagaccctgtctcaatagatagatagatagatagatagatagatagatagatagatagatagataaaaacagagaggtgaaaaatatggttttaagggttctgtttaagaatactctgttccaacatggagtttgtcaactctaaagtggtaaaaaacaagacagattgtagacattttcataaaaggcaggattatttggtgtcaccaaattaaatatgttaatggtcacagcggaggccgactcaatcagccttttattctgccaggctatttgatactgctgagggcttacctatttcctgaggagaaaaatagtcattaaaatgaccttataaatgatagggacttagggtgatagaagtgcaaagcatgactgtcaaatttttggagcaggttttctgacttcggtcggaaaacccctaccccctaattctacaagaatagaaagcttagcagctcctctgaatggttgctctcaggtgctagtggttgcaagtcgtatgttgatgcctgcctttgccctacctggtgtgtgagcgtgagcgcgccccacctctccagcctctctcttactgtttttcagacaagatgggactgttgttctcctactgctatgtacctcaatttcaattgatcatgcctggacataactgcccatgttgtaaggtcgtctacgttgtaaggtcgtgctcagtttctgatgcctagactagtcacctttccgtttgcctcctgactgtgtaaatgaggcaaatgaaggtggtctcttaactgacatgttagtgtttgacctatgggatagtttctcattgttgagacagaatttctagaagctggtccgctgagcggctaagagcacttgctgatattgcaaaggatctacctgggtttggttctcagcactcacatggaagttcacat

SEQ ID NO: 487 - DNA, 654 bp, synthetic construct
  source 1..654: mol_type = other DNA
ccaacaagagagaccctcatctctacaaaatattttttaaaataactgggcctcatggtgcattcctgtaatctgagctagttgggaggatagctagagcccaggagatcgaggctgcagagaaccgtgatcacacgactgcactccagcctgggtgacagagcaagaccctgtctcaatagatagatagatagatagatagatagatagatagatagatagatagataaaaacagagaggtgaaaaatatggttttaagggttctgtttaagaatactctgttccaacatggagtttgtcaactctaaagtggtaaaaaacaagacagattgtagacattttcataaaaggcaggattatttggtgtcaccaaattaaatatgttaatggtcacagcggaggccgactcaatcagccttttattctgccaggctatttgatactgctgagggcttacctatttcctgaggagaaaaatagtcattaaaatgaccttataaatgatagggacttagggtgatagaagtgcaaagcatgactgtcaaatttttggagcaggttttctgacttcggtcggaaaaccccttgtagttcctgcaatttaattttcgtttaaaactttattttattctttaacttaaaaaaaatatata

SEQ ID NO: 488 - DNA, 1087 bp, synthetic construct
  source 1..1087: mol_type = other DNA
gggcatgaaagataaagttctggaggtaagtagtgatgatggttacacaacaatgtgaacatattctatgccagtgaatttacacttaaggttaaaatggtaaattttatgtatactttggcataatttaaaaaaaagtttgaaaaagaaaaaagacaaaacaataatcgtctttggagaagtctgttacactgaatctggagccaagtgaacagaaccctgattttgatcccttttctctcaaaagcccttcgcagtctctgaattaagtctattagcatgttcctcccatagtgctttgcttcatatcaacaaaaacctagctaagtgaaatcagcaacgatatgcagaaaccacctacgcaggtcacaaacatctttctatgattgtataattttcaagcaagcaataagtgaagatttttccataggccctaaactcacctttgcgaaataggaagctggtttattgggagtgatgagcagggggcgtaacaaattaatgatagggacttagggtgatagaagtgcaaagcatgactgtcaaatttttggagcaggttttctgacttcggtcggaaaacccctactttctggagtttcaaaaacagactgtacgccaagggtcatatctttttttgtattggtttgtgtcttggttggtgtcttaggtgttaatcctacagtggagggtttatgggaataggaagtaacatgtcgcctgcatgtcataggagaaaaagcgagcatcagccgtatcggctttgtaacacaaattagctatcgtgaagtccgctcagctcttccctttctaccctggctgctttttgcagggattggtccgtggtctccagtctcttgggttctcaccctgtgtgaaaatcttcgtgtttttccctaccccccagtcacctcttacacagcctctgcttccaagcgcagcccccacaggagtttgtaggatttctgtgctagcggggaatgtgttctcacctcatagagccaggtagaaattatgcagatgggcagttctctgggaagaaagcagggcctttggggctctcagtgtccccgttgggttgtagaca

SEQ ID NO: 489 - DNA, 1087 bp, synthetic construct
  source 1..1087: mol_type = other DNA
gggcatgaaagataaagttctggaggtaagtagtgatgatggttacacaacaatgtgaacatattctatgccagtgaatttacacttaaggttaaaatggtaaattttatgtatactttggcataatttaaaaaaaagtttgaaaaagaaaaaagacaaaacaataatcgtctttggagaagtctgttacactgaatctggagccaagtgaacagaaccctgattttgatcccttttctctcaaaagcccttcgcagtctctgaattaagtctattagcatgttcctcccatagtgctttgcttcatatcaacaaaaacctagctaagtgaaatcagcaacgatatgcagaaaccacctacgcaggtcacaaacatctttctatgattgtataattttcaagcaagcaataagtgaagatttttccataggccctaaactcacctttgcgaaataggaagctggtttattgggagtgatgagcagggggcgtaacaaattaatgatagggacttagggtgatagaagtgcaaagcatgactgtcaaatttttggagcaggttttctgacttcggtcggaaaacccctactttctggagtttctaaaagtagactgtacgctaagggtcatatctttttttgttttggtttgtgtcttggttggcgtcttaaatgttaatcctacagtggagggctggcgaataggaagtaacatgtcgcctgcacgccataggagaaaaagcgagcatcagccgtatcggctttgtaacacaaattagctatcgtgaagtccgctcagctcttccctttctaccctggctgctttttgcagggattggtccgtggtctccagtctcttgggttctcaccctgtgtgaaaatcttcctgtttttccctaccccccaagtcacctcttacacagcctctgcttccaagcgcagcccccacaggagtttgtaggatttctgtgctagcggggagtgtgttctcacctcatagagccaggtagaaactacgcagatgggtgctgttctccaggaagaaagcagggcctttggggctctcagtgtccccgttgggttgtaga

SEQ ID NO: 490 - DNA, 1087 bp, synthetic construct
  source 1..1087: mol_type = other DNA
gggcatgaaagataaagttctggaggtaagtagtgatgatggttacacaacaatgtgaacatattctatgccagtgaatttacacttaaggttaaaatggtaaattttatgtatactttggcataatttaaaaaaaagtttgaaaaagaaaaaagacaaaacaataatcgtctttggagaagtctgttacactgaatctggagccaagtgaacagaaccctgattttgatcccttttctctcaaaagcccttcgcagtctctgaattaagtctattagcatgttcctcccatagtgctttgcttcatatcaacaaaaacctagctaagtgaaatcagcaacgatatgcagaaaccacctacgcaggtcacaaacatctttctatgattgtataattttcaagcaagcaataagtgaagatttttccataggccctaaactcacctttgcgaaataggaagctggtttattgggagtgatgagcagggggcgtaacaaattaatgatagggacttagggtgatagaagtgcaaagcatgactgtcaaatttttggagcaggttttctgacttcggtcggaaaacccctactttctggagtttcaaaaacagaccgtacgccaagggtcatgtcttttttcgtattggtttgtgtcttagttgttaatcctacagtggaggcctggggaataagaagtaacatgtggcctgcacgccataggagaaaaagcgagcatcagccgtatcggctttgtaacacaaattagctatcgtgaagtccgctcagctcttccatttctaccctggctgctttttgcagggattggtccgtggtctccagtctcttgggttctcaccctgtgtgaaaatcttcgtgtttttccctaccccccaagtcacctcttacacagcctctgcttccaagcgcagcccccacaggagtttgtaggatttctgtgctagcggggagtgtgttctcacctcatagagccaggtagaaattatgcagatgggcgctgttctctgggaagaaagcagggcctttggggctctcagtgtccccgttgggttgtagacataacactctta

SEQ ID NO: 491 - DNA, 891 bp, synthetic construct
  source 1..891: mol_type = other DNA
gggcatgaaagataaagttctggaggtaagtagtgatgatggttacacaacaatgtgaacatattctatgccagtgaatttacacttaaggttaaaatggtaaattttatgtatactttggcataatttaaaaaaaagtttgaaaaagaaaaaagacaaaacaataatcgtctttggagaagtctgttacactgaatctggagccaagtgaacagaaccctgattttgatcccttttctctcaaaagcccttcgcagtctctgaattaagtctattagcatgttcctcccatagtgctttgcttcatatcaacaaaaacctagctaagtgaaatcagcaacgatatgcagaaaccacctacgcaggtcacaaacatctttctatgattgtataattttcaagcaagcaataagtgaagatttttccataggccctaaactcacctttgcgaaataggaagctggtttattgggagtgatgagcagggggcgtaacaaattaatgatagggacttagggtgatagaagtgcaaagcatgactgtcaaatttttggagcaggttttctgacttcggtcggaaaacccctcctccggggatacaacgtgtttcctaaaagtagagggaggtaagagacggtagcacctgcggggcggcttgcacgccgagtgcctgtgacgcgccggcttaacttaactgcttccctgaagtaccttgaggttcctgatgtgcgggcggtagacggtaggcttatgcggcacgctgtcgtttccaccgtggctactgcgctttgggaaggccacgacctcctcctttggggaggtccttaggatctcagcttggcagtcgagtgggtggcgaccttttaaaggaatgggacccacccggagttc

SEQ ID NO: 492 - DNA, 1079 bp, synthetic construct
  source 1..1079: mol_type = other DNA
gggcatgaaagataaagttctggaggtaagtagtgatgatggttacacaacaatgtgaacatattctatgccagtgaatttacacttaaggttaaaatggtaaattttatgtatactttggcataatttaaaaaaaagtttgaaaaagaaaaaagacaaaacaataatcgtctttggagaagtctgttacactgaatctggagccaagtgaacagaaccctgattttgatcccttttctctcaaaagcccttcgcagtctctgaattaagtctattagcatgttcctcccatagtgctttgcttcatatcaacaaaaacctagctaagtgaaatcagcaacgatatgcagaaaccacctacgcaggtcacaaacatctttctatgattgtataattttcaagcaagcaataagtgaagatttttccataggccctaaactcacctttgcgaaataggaagctggtttattgggagtgatgagcagggggcgtaacaaattaatgatagggacttagggtgatagaagtgcaaagcatgactgtcaaatttttggagcaggttttctgacttcggtcggaaaacccctttcccttcttgtaatacaaaataataacaaccacagaggacatcgcaagtaaaatgtgtataacaaccccatctaaagaaccctatcatctttctactatctgtctacctaaatatgtatagtataaataaccctatatagcactctaagcaacttaagttaggtaacttagaaaactcttttttttttttgagactgagtctcactctgtcgcacccaggctggagtgcagtggcgtgatctcggctcactgcaacctccaccttctgggttcaagtgattctcccatctcagtctcccaagtagctgggattacaggcacgccaccatgccctgctacatttttttttttttagtagagatgaggtttcaccacattggccaggctgttctcgaactcctgacctcaggtgatccgcccaccttggcctcatgaagtgctgggattacaggtgtgagccactgtacccagccagaaaactcttaaaaaac

SEQ ID NO: 493 - DNA, 969 bp, synthetic construct
  source 1..969: mol_type = other DNA
gggcatgaaagataaagttctggaggtaagtagtgatgatggttacacaacaatgtgaacatattctatgccagtgaatttacacttaaggttaaaatggtaaattttatgtatactttggcataatttaaaaaaaagtttgaaaaagaaaaaagacaaaacaataatcgtctttggagaagtctgttacactgaatctggagccaagtgaacagaaccctgattttgatcccttttctctcaaaagcccttcgcagtctctgaattaagtctattagcatgttcctcccatagtgctttgcttcatatcaacaaaaacctagctaagtgaaatcagcaacgatatgcagaaaccacctacgcaggtcacaaacatctttctatgattgtataattttcaagcaagcaataagtgaagatttttccataggccctaaactcacctttgcgaaataggaagctggtttattgggagtgatgagcagggggcgtaacaaattaatgatagggacttagggtgatagaagtgcaaagcatgactgtcaaatttttggagcaggttttctgacttcggtcggaaaacccctctgaattttcttgcagttgaacaacagaggctttttttgtgtgtgtgggggtgcttggttttgggaggttgaagagtacttgttcgcaaactctctaaatgagagatggggaagtgtcttaccagctgattcgcgagagcacctgcaagtttacctgttttagtgatttgcgtttatgaaagttggagttgctgattttgtgatctctacttttaaggtaaaagcagggcggtgttgacttttcttgccagttggctgtcctgttttctttctcgcactgttttctttttgagacgaagtctgtcgctcaggctggagtgcactggcgtgatctcggctcgctgcaaactttgccgaacccctgtttagcgatttccgtttg

SEQ ID NO: 494 - DNA, 1087 bp, synthetic construct
  source 1..1087: mol_type = other DNA
gggcatgaaagataaagttctggaggtaagtagtgatgatggttacacaacaatgtgaacatattctatgccagtgaatttacacttaaggttaaaatggtaaattttatgtatactttggcataatttaaaaaaaagtttgaaaaagaaaaaagacaaaacaataatcgtctttggagaagtctgttacactgaatctggagccaagtgaacagaaccctgattttgatcccttttctctcaaaagcccttcgcagtctctgaattaagtctattagcatgttcctcccatagtgctttgcttcatatcaacaaaaacctagctaagtgaaatcagcaacgatatgcagaaaccacctacgcaggtcacaaacatctttctatgattgtataattttcaagcaagcaataagtgaagatttttccataggccctaaactcacctttgcgaaataggaagctggtttattgggagtgatgagcagggggcgtaacaaattaatgatagggacttagggtgatagaagtgcaaagcatgactgtcaaatttttggagcaggttttctgacttcggtcggaaaacccctatatgtggtaatccaacaatagaaattatttttaagtttgtgtgttcctttttctgttcaatggtgcttttgatattgttgtaaagcagtgactagcagattctgtgtggtaaaagcactgaaccctgtttagttcttttctccctaccttattggtaattatttctgtgtatatatgttccaaagaaatgcggcttgtatattcatgcttttcaactttttgtgatagacagttgatacacaagtagtacctcctccgggatcttcttagtcaagactgtttggtagatgcatgttttttgttacttgtaatgtacagtattcagttcattttctttttgcagcactgtccggttgaaacacaacgcgaggatcgggcgtggtggctcacgcctgtaatcccagcactttgggaggccgaggcaggacaatcaagaccaatcctggtcatcaaggcaggagaatcaagaccatcgaggtcaggagatcaagaccatcct

SEQ ID NO: 495 - DNA, 1085 bp, synthetic construct
  source 1..1085: mol_type = other DNA
gggcatgaaagataaagttctggaggtaagtagtgatgatggttacacaacaatgtgaacatattctatgccagtgaatttacacttaaggttaaaatggtaaattttatgtatactttggcataatttaaaaaaaagtttgaaaaagaaaaaagacaaaacaataatcgtctttggagaagtctgttacactgaatctggagccaagtgaacagaaccctgattttgatcccttttctctcaaaagcccttcgcagtctctgaattaagtctattagcatgttcctcccatagtgctttgcttcatatcaacaaaaacctagctaagtgaaatcagcaacgatatgcagaaaccacctacgcaggtcacaaacatctttctatgattgtataattttcaagcaagcaataagtgaagatttttccataggccctaaactcacctttgcgaaataggaagctggtttattgggagtgatgagcagggggcgtaacaaattaatgatagggacttagggtgatagaagtgcaaagcatgactgtcaaatttttggagcaggttttctgacttcggtcggaaaacccctacatcaggttgtttttctgtttttacatcaggttgtttttctgtttggttttttttttacaccacgtttatacgccggtgcacggtttaccactgaaaacacctttcatctacaggtgatatcttttaacacaaataaaatgtagtagtcctaggagacggaatagaaggaggtggggcctaggcagattcatctctgcggtgcattttgcctctggccctcgggccctagtttgcgatctttcccatcttgcctctgcttccctctgcacaatcctgagtattgcagtaccttacacttaaggaaatttcgtcttgccaaagttgatccatttcagctccgaaacataacaggaactagtgcaacgataaacgtatgaggaacttgcaataagagtgacagaatcctttgaatcaaaaaaaaaaaaagccaccacttaatgagtatctaccatatgtcaagggcttcaccaatatttcattgaaatattccagacca

SEQ ID NO: 496 - DNA, 1087 bp, synthetic construct
  source 1..1087: mol_type = other DNA
gggcatgaaagataaagttctggaggtaagtagtgatgatggttacacaacaatgtgaacatattctatgccagtgaatttacacttaaggttaaaatggtaaattttatgtatactttggcataatttaaaaaaaagtttgaaaaagaaaaaagacaaaacaataatcgtctttggagaagtctgttacactgaatctggagccaagtgaacagaaccctgattttgatcccttttctctcaaaagcccttcgcagtctctgaattaagtctattagcatgttcctcccatagtgctttgcttcatatcaacaaaaacctagctaagtgaaatcagcaacgatatgcagaaaccacctacgcaggtcacaaacatctttctatgattgtataattttcaagcaagcaataagtgaagatttttccataggccctaaactcacctttgcgaaataggaagctggtttattgggagtgatgagcagggggcgtaacaaattaatgatagggacttagggtgatagaagtgcaaagcatgactgtcaaatttttggagcaggttttctgacttcggtcggaaaacccctcttatgatgtttgttgccaatgatagattgttttcactgtgcaaaaattatgggtagttttggtggtcttgatgcagttgtaagcttggggtatgaaggtttgggccacgcctgggcgcttccggctgcgccggatgctgtttcctttccgctcccaggggcgttgggaacggttgtaggacgtggctctttattcgtgagttttccatttacctccgctgaacctagagcttcagacgccctatggcgtccgcctcgacccaaccggcggccttgagcgctgagcaagcaaagggtgagaatcgtcctagtcaaggcataggctgctggcctggggtagtcaaggcatgggctgctggtctggggaggatgcgggcggaggatgtggggcgacaaacctggctacgtccgccgggaaaatggggtaggggacgccgggtaccgtccttctaagtggggcgcttgcccccaagacttgggatcttattgggttacctaca

SEQ ID NO: 497 - DNA, 1085 bp, synthetic construct
  source 1..1085: mol_type = other DNA
gggcatgaaagataaagttctggaggtaagtagtgatgatggttacacaacaatgtgaacatattctatgccagtgaatttacacttaaggttaaaatggtaaattttatgtatactttggcataatttaaaaaaaagtttgaaaaagaaaaaagacaaaacaataatcgtctttggagaagtctgttacactgaatctggagccaagtgaacagaaccctgattttgatcccttttctctcaaaagcccttcgcagtctctgaattaagtctattagcatgttcctcccatagtgctttgcttcatatcaacaaaaacctagctaagtgaaatcagcaacgatatgcagaaaccacctacgcaggtcacaaacatctttctatgattgtataattttcaagcaagcaataagtgaagatttttccataggccctaaactcacctttgcgaaataggaagctggtttattgggagtgatgagcagggggcgtaacaaattaatgatagggacttagggtgatagaagtgcaaagcatgactgtcaaatttttggagcaggttttctgacttcggtcggaaaaccccttctttactgttatatgttaggcgaaatattacgcgtttggagtaagtggtgctttttgtaactgaaaagagattctgtgtgtgtttttttttttttagaggctgcatagttatttgtatgaaccgcaggtgacctaattagcaaggtaattcagacctgtatcctagcacttaagaagtggaagtgggataaccctgcgtgttctcgtgtgggaggctagcttaagcaacaaagcaggaaggccccaccaacaaaagaatttaaaaattatacgtgcgtggtggcgcgcgtatgaggaaattatttggcaactgtgttacagtatagcagcaaatggaatagacctagtccctgactttaggagacctgcctcagccccccgaatggctgggactacaggcgtgcgcctccgcgcccagctaatttttgcatttttggtagagacgggttcaccatgttggccaggatggtctccatctcttcatctggtgatccgcc

SEQ ID NO: 498 - DNA, 1087 bp, synthetic construct
  source 1..1087: mol_type = other DNA
gggcatgaaagataaagttctggaggtaagtagtgatgatggttacacaacaatgtgaacatattctatgccagtgaatttacacttaaggttaaaatggtaaattttatgtatactttggcataatttaaaaaaaagtttgaaaaagaaaaaagacaaaacaataatcgtctttggagaagtctgttacactgaatctggagccaagtgaacagaaccctgattttgatcccttttctctcaaaagcccttcgcagtctctgaattaagtctattagcatgttcctcccatagtgctttgcttcatatcaacaaaaacctagctaagtgaaatcagcaacgatatgcagaaaccacctacgcaggtcacaaacatctttctatgattgtataattttcaagcaagcaataagtgaagatttttccataggccctaaactcacctttgcgaaataggaagctggtttattgggagtgatgagcagggggcgtaacaaattaatgatagggacttagggtgatagaagtgcaaagcatgactgtcaaatttttggagcaggttttctgacttcggtcggaaaacccctaccttattcacgcctaaaaagtagactgactgtggggtggtcgtgttttttgtttcttgttggtaggtggtgaatgcgtttttttcgttgttttctccgttactcaggctgccagttgcttggcagtcttgtcgctggctgtggacgctctgcacttcatcaccgtccccagctgcgctttgagccggtctaaggttgcccacagtattgacgttgggacccacgaaactggcaatttccatgtgtgcggccttacccagttctcccaaacttctgcgtataaccgcttctctgtgcttcagaaagataagtccggccccggcctcacacagcagctcagttcgtgacagcgtttaatatgtaaaatggagcaaataatttatagggcgttgggagagttaaagagactaattcatttacgtgttaaatacagggaatggcttttgcattgatataaccccagcctccagcatgcgccagacctgacgtaggtgttcggc

SEQ ID NO: 499 - DNA, 1087 bp, synthetic construct
  source 1..1087: mol_type = other DNA
gggcatgaaagataaagttctggaggtaagtagtgatgatggttacacaacaatgtgaacatattctatgccagtgaatttacacttaaggttaaaatggtaaattttatgtatactttggcataatttaaaaaaaagtttgaaaaagaaaaaagacaaaacaataatcgtctttggagaagtctgttacactgaatctggagccaagtgaacagaaccctgattttgatcccttttctctcaaaagcccttcgcagtctctgaattaagtctattagcatgttcctcccatagtgctttgcttcatatcaacaaaaacctagctaagtgaaatcagcaacgatatgcagaaaccacctacgcaggtcacaaacatctttctatgattgtataattttcaagcaagcaataagtgaagatttttccataggccctaaactcacctttgcgaaataggaagctggtttattgggagtgatgagcagggggcgtaacaaattaatgatagggacttagggtgatagaagtgcaaagcatgactgtcaaatttttggagcaggttttctgacttcggtcggaaaaccccttttgacccattacccatctaagttagatgcttttttaaatgttttttaatttttaaatttttaatttttttcattatttattttttatttttgagacggatctcggctcactgtaacctccacctcccgggttcaagcgattctcctgactcagcctcccgagtagctgggattacaggcgcgcgccaccatgcccggctaatttttctatttttagtaaagacggggtttcgccatgttgaccagggtggtcttgaactcctgacgtcaggtgatcctcctgcctcgtgctgggattgcaggcgtgagccaccgctcccggcccttagatgctttttaatcagcaagtacgcaatgctttcctgacaggaatgtcaagtccgtcaggaaatccacataagggtgttaagcaggcaaagtaccacatacagattaaaatcaaaagcactgtcaacgcttatttaatttatacagtagaccctaacttttctaattttgtg

SEQ ID NO: 500 - DNA, 1087 bp, synthetic construct
  source 1..1087: mol_type = other DNA
gggcatgaaagataaagttctggaggtaagtagtgatgatggttacacaacaatgtgaacatattctatgccagtgaatttacacttaaggttaaaatggtaaattttatgtatactttggcataatttaaaaaaaagtttgaaaaagaaaaaagacaaaacaataatcgtctttggagaagtctgttacactgaatctggagccaagtgaacagaaccctgattttgatcccttttctctcaaaagcccttcgcagtctctgaattaagtctattagcatgttcctcccatagtgctttgcttcatatcaacaaaaacctagctaagtgaaatcagcaacgatatgcagaaaccacctacgcaggtcacaaacatctttctatgattgtataattttcaagcaagcaataagtgaagatttttccataggccctaaactcacctttgcgaaataggaagctggtttattgggagtgatgagcagggggcgtaacaaattaatgatagggacttagggtgatagaagtgcaaagcatgactgtcaaatttttggagcaggttttctgacttcggtcggaaaacccctgtttacttggttttaaaaatagcttgcactagcgataccgcgaatatggttattaggtttgttaggcacagtcgtgtcttactatagaaaaataacgtagtgttcattttgctgcctgtatgtgttaatttgtccttattgcgccattgttcttgttaagtcttctgtaaggagttgcgggtttcaaactgtcagtctgagagcataagctcacttttcagtcagttgaattgaatgttacattcgattggttctggatattgatattacccaaggcttgtcctgtttgtaagtcttttcctacacctgacaatatgattatgtttacaatgtccctagaactctgggtgtatcgttcccactgaataaaatttgatctctaagttgacctataaatttaagtaccaaaaaactggtttgtaagattttggaaggcagaggcagggaagagaccaacgtggtctacatataaagtaccaggtacatataaagtaccaggt

SEQ ID NO: 501 - DNA, 1083 bp, synthetic construct
  source 1..1083: mol_type = other DNA
gggcatgaaagataaagttctggaggtaagtagtgatgatggttacacaacaatgtgaacatattctatgccagtgaatttacacttaaggttaaaatggtaaattttatgtatactttggcataatttaaaaaaaagtttgaaaaagaaaaaagacaaaacaataatcgtctttggagaagtctgttacactgaatctggagccaagtgaacagaaccctgattttgatcccttttctctcaaaagcccttcgcagtctctgaattaagtctattagcatgttcctcccatagtgctttgcttcatatcaacaaaaacctagctaagtgaaatcagcaacgatatgcagaaaccacctacgcaggtcacaaacatctttctatgattgtataattttcaagcaagcaataagtgaagatttttccataggccctaaactcacctttgcgaaataggaagctggtttattgggagtgatgagcagggggcgtaacaaattaatgatagggacttagggtgatagaagtgcaaagcatgactgtcaaatttttggagcaggttttctgacttcggtcggaaaacccctatttttgtggtgctaaaagttagattgcattccgcccttctcacgtctctttacgtgttgtttgcgaggcgtggcctcggaggtaaatggtctccttttacctcagataagcttacctttgctctgtgagtaagaatgtagctacacttccaaatttagctattgtcctttgcggtccaaatgaaaatattaccttccgatctaacaatgttaaactagtcccaggcccttctatcgattgccagaatagactagactactacacagacacaccctctcaaatcaggccagctcctgcaacctgcacctacagtttgtcccctgggacaaatgaaaggacaggccctctttcccccccccccccaaatcagagcacacacagatcttggggtctggggcagaaatttcgttcatggaaaaaacaaacaaacaaacaaacacgatcaaaggaagctcgttccctttggcctcagggtttcttagacgccgtgttccc

SEQ ID NO: 502 - DNA, 1084 bp, synthetic construct
  source 1..1084: mol_type = other DNA
gggcatgaaagataaagttctggaggtaagtagtgatgatggttacacaacaatgtgaacatattctatgccagtgaatttacacttaaggttaaaatggtaaattttatgtatactttggcataatttaaaaaaaagtttgaaaaagaaaaaagacaaaacaataatcgtctttggagaagtctgttacactgaatctggagccaagtgaacagaaccctgattttgatcccttttctctcaaaagcccttcgcagtctctgaattaagtctattagcatgttcctcccatagtgctttgcttcatatcaacaaaaacctagctaagtgaaatcagcaacgatatgcagaaaccacctacgcaggtcacaaacatctttctatgattgtataattttcaagcaagcaataagtgaagatttttccataggccctaaactcacctttgcgaaataggaagctggtttattgggagtgatgagcagggggcgtaacaaattaatgatagggacttagggtgatagaagtgcaaagcatgactgtcaaatttttggagcaggttttctgacttcggtcggaaaacccctataactggtaaccaaaagcagattactttcccccttgtggtcttcgcgtttgcggacgggagagaactttcggccattttccttttagaaatttaacttcttgaaggccaccaggtgacccttacttccctctcacctttccttctacctgtactttctctattaaaaagcctgcagaagtacccttgacaaattgccaaaaatgacacctaaaaaaaaaaaaaggaaaaacgacaccttaggtaattataggttgtaagaaaaagatttgacctcttggagtttttatttcttaataccaaaggacacccaaggaacgtatctctcaaaattgggtttcaaacctcagccgtttccttcttagttccagtgcttaacacgcaacagacctgcacaccactacactgcatacgagttttaaagttaataaatcagtcacccctccatagtcttctacctacttgaagacagaaacggctgctaggaagcaattcttc

SEQ ID NO: 503 - DNA, 1087 bp, synthetic construct
  source 1..1087: mol_type = other DNA
gggcatgaaagataaagttctggaggtaagtagtgatgatggttacacaacaatgtgaacatattctatgccagtgaatttacacttaaggttaaaatggtaaattttatgtatactttggcataatttaaaaaaaagtttgaaaaagaaaaaagacaaaacaataatcgtctttggagaagtctgttacactgaatctggagccaagtgaacagaaccctgattttgatcccttttctctcaaaagcccttcgcagtctctgaattaagtctattagcatgttcctcccatagtgctttgcttcatatcaacaaaaacctagctaagtgaaatcagcaacgatatgcagaaaccacctacgcaggtcacaaacatctttctatgattgtataattttcaagcaagcaataagtgaagatttttccataggccctaaactcacctttgcgaaataggaagctggtttattgggagtgatgagcagggggcgtaacaaattaatgatagggacttagggtgatagaagtgcaaagcatgactgtcaaatttttggagcaggttttctgacttcggtcggaaaacccctctggggaataagagtggtttaaagaaagaacaatttgagagatctgcttagatctaataaaacccaagtatagtttctttagacgtcttatatctcacgtaggacctcttatttcagactcactgcaagaacaagctaaagaactatatacagtcaggaacaaggtgagccatcgcggttctcagtcccatgatcttaagagtttttcctcttcccctcttccctggctgtcctggagctcactctgtagaccaggctggtctcaaactcagaaatccacttacctctgcctcccaagggctgggattaaaggcatgcaccaccattgcccggcagggtatgtggactatgctgtccttcaactcagagatcgtggtactttaaatctcattttccgaaagaaaagaaaagaaaggaaggggggaaataaagccagtatattttgcacccacaatctgaagttctacaaatattgttagaaaatgcaaaggacccaagtc

SEQ ID NO: 504 - DNA, 1087 bp, synthetic construct
  source 1..1087: mol_type = other DNA
gggcatgaaagataaagttctggaggtaagtagtgatgatggttacacaacaatgtgaacatattctatgccagtgaatttacacttaaggttaaaatggtaaattttatgtatactttggcataatttaaaaaaaagtttgaaaaagaaaaaagacaaaacaataatcgtctttggagaagtctgttacactgaatctggagccaagtgaacagaaccctgattttgatcccttttctctcaaaagcccttcgcagtctctgaattaagtctattagcatgttcctcccatagtgctttgcttcatatcaacaaaaacctagctaagtgaaatcagcaacgatatgcagaaaccacctacgcaggtcacaaacatctttctatgattgtataattttcaagcaagcaataagtgaagatttttccataggccctaaactcacctttgcgaaataggaagctggtttattgggagtgatgagcagggggcgtaacaaattaatgatagggacttagggtgatagaagtgcaaagcatgactgtcaaatttttggagcaggttttctgacttcggtcggaaaacccctctcggtttatcttaaagggttttaaatatagaaagcttccttagtcttatgggtgagagtgctgtttaagccttacctaggtatgtctttgaacatttattacagattgttatttgtgactatgaccactcaggtgttctgttcttgtgaatttagacacactcagaaaggctacacactcaaagaccacaccaaagtgaagtactatctgggccgtgaaactggtcacatatcagttattttgcagtaaaacaaggaagtcaatcatactgcttcagtgggtcagggagtcaagaatgcacagtacaagagctggtgagattcctcagcaggtaagagcactgaatgctcttccaaagattctgagttcaaatcccagcaaccacgtggtggatttgaacaaaggatgaaaacaaccatccataaccagatctgatgccctcttctggagtgtcaaaagacagctatggtgtacttacataaataaataagtaaaaaca

SEQ ID NO: 505 - DNA, 1087 bp, synthetic construct
  source 1..1087: mol_type = other DNA
gggcatgaaagataaagttctggaggtaagtagtgatgatggttacacaacaatgtgaacatattctatgccagtgaatttacacttaaggttaaaatggtaaattttatgtatactttggcataatttaaaaaaaagtttgaaaaagaaaaaagacaaaacaataatcgtctttggagaagtctgttacactgaatctggagccaagtgaacagaaccctgattttgatcccttttctctcaaaagcccttcgcagtctctgaattaagtctattagcatgttcctcccatagtgctttgcttcatatcaacaaaaacctagctaagtgaaatcagcaacgatatgcagaaaccacctacgcaggtcacaaacatctttctatgattgtataattttcaagcaagcaataagtgaagatttttccataggccctaaactcacctttgcgaaataggaagctggtttattgggagtgatgagcagggggcgtaacaaattaatgatagggacttagggtgatagaagtgcaaagcatgactgtcaaatttttggagcaggttttctgacttcggtcggaaaacccctccacattttgtgtttaaaaatagaaatatttaagtgagatcagtttaaatctgctttatctagggtgtctaactgcttgcatctttttaacttttccttatttgtgagaaggtctgtaaaacttattatatgttagtacactgtagctgtcttcagacactccagaagagggattcagatcaccttacagatggttttgagccaccatgtggttgctgggatttgaactcaggacctttagaaaagtagttgggtgctcttacccgctgagccatctcaccagccctttttttttcttttttccagttcgggtttctctgtgtgtagccctggctgtcctggaactcattctgtagaccgggctggcctcgaactcagaaatctgcctgcctctgcctcccaagtgctgggattaaaggaatgtgccttcattgcccggctctagggctttttgttgttgtttgtttgtttgtttgtttgtttgcttttgtggatggcct

SEQ ID NO: 506 - DNA, 1087 bp, synthetic construct
  source 1..1087: mol_type = other DNA
gggcatgaaagataaagttctggaggtaagtagtgatgatggttacacaacaatgtgaacatattctatgccagtgaatttacacttaaggttaaaatggtaaattttatgtatactttggcataatttaaaaaaaagtttgaaaaagaaaaaagacaaaacaataatcgtctttggagaagtctgttacactgaatctggagccaagtgaacagaaccctgattttgatcccttttctctcaaaagcccttcgcagtctctgaattaagtctattagcatgttcctcccatagtgctttgcttcatatcaacaaaaacctagctaagtgaaatcagcaacgatatgcagaaaccacctacgcaggtcacaaacatctttctatgattgtataattttcaagcaagcaataagtgaagatttttccataggccctaaactcacctttgcgaaataggaagctggtttattgggagtgatgagcagggggcgtaacaaattaatgatagggacttagggtgatagaagtgcaaagcatgactgtcaaatttttggagcaggttttctgacttcggtcggaaaacccctaaaaccagtaagggagaaaggtcaagtaacatataaaggaaggcctatcagaattacaccagacttttcaccagagactatgaaagccagaagagcctggacagatgttatacagacactaagagaacacaaatgccagcccaggctactatacctggccaaactctcaattaccatagatggagaaaccaaagtattccacgacaaaaacaaattcacacaatatctttccacgaatccagcccttcaaaggataatgacagaaaagaagcaatacaaggacggaaatcacgccctagaacaaccaagaaactaatcattcaacaaaccaaaaagaagacagccacaagaacagaatgccaactctaacaacaaaaataaaaggaagcaacaattacttttccttaatatctcttaatatcaatggactcaattccccaataaaaagacatagactaacagactggctacacaaacaggacccaacattctgctgctta

SEQ ID NO: 507 - DNA, 1087 bp, synthetic construct
  source 1..1087: mol_type = other DNA
gggcatgaaagataaagttctggaggtaagtagtgatgatggttacacaacaatgtgaacatattctatgccagtgaatttacacttaaggttaaaatggtaaattttatgtatactttggcataatttaaaaaaaagtttgaaaaagaaaaaagacaaaacaataatcgtctttggagaagtctgttacactgaatctggagccaagtgaacagaaccctgattttgatcccttttctctcaaaagcccttcgcagtctctgaattaagtctattagcatgttcctcccatagtgctttgcttcatatcaacaaaaacctagctaagtgaaatcagcaacgatatgcagaaaccacctacgcaggtcacaaacatctttctatgattgtataattttcaagcaagcaataagtgaagatttttccataggccctaaactcacctttgcgaaataggaagctggtttattgggagtgatgagcagggggcgtaacaaattaatgatagggacttagggtgatagaagtgcaaagcatgactgtcaaatttttggagcaggttttctgacttcggtcggaaaacccctcccaatttcactggtctacaatgaaagcaaaacagttctcttccccgctccccggtgtgtgagaggggctttgatccttctctggtttcctaggaaacgcgtatgtgctagagccacgctctgagacttccgcctcgtgcggtcccgcttcctttctgcctcctctggcctgcatccgtgggggaggtggctggctgcagggttctccggatctcttctgtgttcccactactcaagcaccgagtggcgttctatggcgtccgcctcggctcagcccgcggccctgagcgcggagcaggccaagggtgaggaaagagcctagtctgggtgtgggccgtcttctggggggagggcgcgatactattctttgcctctccaagtggggcccttgcccattagggcgaagggttgggaggacaagcttatcgggttgcttgcaggcctcggcccactaattccctgcctcttccctcctctgggctcgcccgccgtcctccgcg

SEQ ID NO: 508 - DNA, 1087 bp, synthetic construct
  source 1..1087: mol_type = other DNA
gggcatgaaagataaagttctggaggtaagtagtgatgatggttacacaacaatgtgaacatattctatgccagtgaatttacacttaaggttaaaatggtaaattttatgtatactttggcataatttaaaaaaaagtttgaaaaagaaaaaagacaaaacaataatcgtctttggagaagtctgttacactgaatctggagccaagtgaacagaaccctgattttgatcccttttctctcaaaagcccttcgcagtctctgaattaagtctattagcatgttcctcccatagtgctttgcttcatatcaacaaaaacctagctaagtgaaatcagcaacgatatgcagaaaccacctacgcaggtcacaaacatctttctatgattgtataattttcaagcaagcaataagtgaagatttttccataggccctaaactcacctttgcgaaataggaagctggtttattgggagtgatgagcagggggcgtaacaaattaatgatagggacttagggtgatagaagtgcaaagcatgactgtcaaatttttggagcaggttttctgacttcggtcggaaaacccctgaatttgttaaattacaggaggaagcttttttagttcattttacaaatactttcttgttaggtagataataccttctaaggttattatctggatcttctaagtctttttatcgctagcaagtctaagtttctggactttggaattagaagttaatgtcgtaggcgggcatggtggtccacgcctttaatcccagagtttgggaggcagacgcaggtggttttctgagttcgaggccatcctgctcttcaatgttagttccaggacagccagggttatacaaagaaaccctgtctcgagaaacaaaacaaacaaaaaaagagtagctgagtgctctgagttgtctctccagccccttagctatttattttcatttaaattatttttgttttattcgcttgtgtgcctgagtttgaatttcccgggattaacagttgaagactagggctggtgagatggctcagcggttaagattgccgactgctcttccaaaggtcctgag

SEQ ID NO: 509 - DNA, 1087 bp, synthetic construct
  source 1..1087: mol_type = other DNA
gggcatgaaagataaagttctggaggtaagtagtgatgatggttacacaacaatgtgaacatattctatgccagtgaatttacacttaaggttaaaatggtaaattttatgtatactttggcataatttaaaaaaaagtttgaaaaagaaaaaagacaaaacaataatcgtctttggagaagtctgttacactgaatctggagccaagtgaacagaaccctgattttgatcccttttctctcaaaagcccttcgcagtctctgaattaagtctattagcatgttcctcccatagtgctttgcttcatatcaacaaaaacctagctaagtgaaatcagcaacgatatgcagaaaccacctacgcaggtcacaaacatctttctatgattgtataattttcaagcaagcaataagtgaagatttttccataggccctaaactcacctttgcgaaataggaagctggtttattgggagtgatgagcagggggcgtaacaaattaatgatagggacttagggtgatagaagtgcaaagcatgactgtcaaatttttggagcaggttttctgacttcggtcggaaaacccctaccccctaattctacaagaatagaaagcttagcagctcctctgaatggttgctctcaggtgctagtggttgcaagtcgtatgttgatgcctgcctttgccctacctggtgtgtgagcgtgagcgcgccccacctctccagcctctctcttactgtttttcagacaagatgggactgttgttctcctactgctatgtacctcaatttcaattgatcatgcctggacataactgcccatgttgtaaggtcgtctacgttgtaaggtcgtgctcagtttctgatgcctagactagtcacctttccgtttgcctcctgactgtgtaaatgaggcaaatgaaggtggtctcttaactgacatgttagtgtttgacctatgggatagtttctcattgttgagacagaatttctagaagctggtccgctgagcggctaagagcacttgctgatattgcaaaggatctacctgggtttggttctcagcactcacatggaagttcacat

SEQ ID NO: 510 - DNA, 654 bp, synthetic construct
  source 1..654: mol_type = other DNA
gggcatgaaagataaagttctggaggtaagtagtgatgatggttacacaacaatgtgaacatattctatgccagtgaatttacacttaaggttaaaatggtaaattttatgtatactttggcataatttaaaaaaaagtttgaaaaagaaaaaagacaaaacaataatcgtctttggagaagtctgttacactgaatctggagccaagtgaacagaaccctgattttgatcccttttctctcaaaagcccttcgcagtctctgaattaagtctattagcatgttcctcccatagtgctttgcttcatatcaacaaaaacctagctaagtgaaatcagcaacgatatgcagaaaccacctacgcaggtcacaaacatctttctatgattgtataattttcaagcaagcaataagtgaagatttttccataggccctaaactcacctttgcgaaataggaagctggtttattgggagtgatgagcagggggcgtaacaaattaatgatagggacttagggtgatagaagtgcaaagcatgactgtcaaatttttggagcaggttttctgacttcggtcggaaaaccccttgtagttcctgcaatttaattttcgtttaaaactttattttattctttaacttaaaaaaaatatata

SEQ ID NO: 511 - DNA, 1081 bp, synthetic construct
  source 1..1081: mol_type = other DNA
gagacagggcttaaaagtcctgggcaattagctgggcacagtgtcgtgcgcctgtaatcccacctagttgggaggctgaggcagaagaatctcttgaacccgaggtagaggttgcagtgagccgagatcgcgccactgcactccagcctggatgacagagtgagaccctgtctcaaaaaaaaaaaaagtcctgggcagcaaggcctccacttcaccccctaaaggttgccccaagagcaccgtgtgactgctaaggtatttccggagtctaaagacgattattcaggtctcatttgcatacccataatacactgcaaacagtatttttttcggaaaaacatttatatattgcttgacatttttaagtatgagaattttgcatgcagaatttttttgtataaactttctcaggtagtaacccttgggattagtagacaccatcagtgtactaggaattgcagttacccgaaaattgagttacagaagtaactggtaatgatagggacttagggtgatagaagtgcaaagcatgactgtcaaatttttggagcaggttttctgacttcggtcggaaaacccctactttctggagtttcaaaaacagactgtacgccaagggtcatatctttttttgtattggtttgtgtcttggttggtgtcttaggtgttaatcctacagtggagggtttatgggaataggaagtaacatgtcgcctgcatgtcataggagaaaaagcgagcatcagccgtatcggctttgtaacacaaattagctatcgtgaagtccgctcagctcttccctttctaccctggctgctttttgcagggattggtccgtggtctccagtctcttgggttctcaccctgtgtgaaaatcttcgtgtttttccctaccccccagtcacctcttacacagcctctgcttccaagcgcagcccccacaggagtttgtaggatttctgtgctagcggggaatgtgttctcacctcatagagccaggtagaaattatgcagatgggcagttctctgggaagaaagcagggcctttggggctctcagtgtccccgttgggttgtagaca

SEQ ID NO: 512 - DNA, 1081 bp, synthetic construct
  source 1..1081: mol_type = other DNA
gagacagggcttaaaagtcctgggcaattagctgggcacagtgtcgtgcgcctgtaatcccacctagttgggaggctgaggcagaagaatctcttgaacccgaggtagaggttgcagtgagccgagatcgcgccactgcactccagcctggatgacagagtgagaccctgtctcaaaaaaaaaaaaagtcctgggcagcaaggcctccacttcaccccctaaaggttgccccaagagcaccgtgtgactgctaaggtatttccggagtctaaagacgattattcaggtctcatttgcatacccataatacactgcaaacagtatttttttcggaaaaacatttatatattgcttgacatttttaagtatgagaattttgcatgcagaatttttttgtataaactttctcaggtagtaacccttgggattagtagacaccatcagtgtactaggaattgcagttacccgaaaattgagttacagaagtaactggtaatgatagggacttagggtgatagaagtgcaaagcatgactgtcaaatttttggagcaggttttctgacttcggtcggaaaacccctactttctggagtttctaaaagtagactgtacgctaagggtcatatctttttttgttttggtttgtgtcttggttggcgtcttaaatgttaatcctacagtggagggctggcgaataggaagtaacatgtcgcctgcacgccataggagaaaaagcgagcatcagccgtatcggctttgtaacacaaattagctatcgtgaagtccgctcagctcttccctttctaccctggctgctttttgcagggattggtccgtggtctccagtctcttgggttctcaccctgtgtgaaaatcttcctgtttttccctaccccccaagtcacctcttacacagcctctgcttccaagcgcagcccccacaggagtttgtaggatttctgtgctagcggggagtgtgttctcacctcatagagccaggtagaaactacgcagatgggtgctgttctccaggaagaaagcagggcctttggggctctcagtgtccccgttgggttgtaga

SEQ ID NO: 513 - DNA, 1081 bp, synthetic construct
  source 1..1081: mol_type = other DNA
gagacagggcttaaaagtcctgggcaattagctgggcacagtgtcgtgcgcctgtaatcccacctagttgggaggctgaggcagaagaatctcttgaacccgaggtagaggttgcagtgagccgagatcgcgccactgcactccagcctggatgacagagtgagaccctgtctcaaaaaaaaaaaaagtcctgggcagcaaggcctccacttcaccccctaaaggttgccccaagagcaccgtgtgactgctaaggtatttccggagtctaaagacgattattcaggtctcatttgcatacccataatacactgcaaacagtatttttttcggaaaaacatttatatattgcttgacatttttaagtatgagaattttgcatgcagaatttttttgtataaactttctcaggtagtaacccttgggattagtagacaccatcagtgtactaggaattgcagttacccgaaaattgagttacagaagtaactggtaatgatagggacttagggtgatagaagtgcaaagcatgactgtcaaatttttggagcaggttttctgacttcggtcggaaaacccctactttctggagtttcaaaaacagaccgtacgccaagggtcatgtcttttttcgtattggtttgtgtcttagttgttaatcctacagtggaggcctggggaataagaagtaacatgtggcctgcacgccataggagaaaaagcgagcatcagccgtatcggctttgtaacacaaattagctatcgtgaagtccgctcagctcttccatttctaccctggctgctttttgcagggattggtccgtggtctccagtctcttgggttctcaccctgtgtgaaaatcttcgtgtttttccctaccccccaagtcacctcttacacagcctctgcttccaagcgcagcccccacaggagtttgtaggatttctgtgctagcggggagtgtgttctcacctcatagagccaggtagaaattatgcagatgggcgctgttctctgggaagaaagcagggcctttggggctctcagtgtccccgttgggttgtagacataacactctta

SEQ ID NO: 514 - DNA, 885 bp, synthetic construct
  source 1..885: mol_type = other DNA
gagacagggcttaaaagtcctgggcaattagctgggcacagtgtcgtgcgcctgtaatcccacctagttgggaggctgaggcagaagaatctcttgaacccgaggtagaggttgcagtgagccgagatcgcgccactgcactccagcctggatgacagagtgagaccctgtctcaaaaaaaaaaaaagtcctgggcagcaaggcctccacttcaccccctaaaggttgccccaagagcaccgtgtgactgctaaggtatttccggagtctaaagacgattattcaggtctcatttgcatacccataatacactgcaaacagtatttttttcggaaaaacatttatatattgcttgacatttttaagtatgagaattttgcatgcagaatttttttgtataaactttctcaggtagtaacccttgggattagtagacaccatcagtgtactaggaattgcagttacccgaaaattgagttacagaagtaactggtaatgatagggacttagggtgatagaagtgcaaagcatgactgtcaaatttttggagcaggttttctgacttcggtcggaaaacccctcctccggggatacaacgtgtttcctaaaagtagagggaggtaagagacggtagcacctgcggggcggcttgcacgccgagtgcctgtgacgcgccggcttaacttaactgcttccctgaagtaccttgaggttcctgatgtgcgggcggtagacggtaggcttatgcggcacgctgtcgtttccaccgtggctactgcgctttgggaaggccacgacctcctcctttggggaggtccttaggatctcagcttggcagtcgagtgggtggcgaccttttaaaggaatgggacccacccggagttc

SEQ ID NO: 515 - DNA, 1073 bp, synthetic construct
  source 1..1073: mol_type = other DNA
gagacagggcttaaaagtcctgggcaattagctgggcacagtgtcgtgcgcctgtaatcccacctagttgggaggctgaggcagaagaatctcttgaacccgaggtagaggttgcagtgagccgagatcgcgccactgcactccagcctggatgacagagtgagaccctgtctcaaaaaaaaaaaaagtcctgggcagcaaggcctccacttcaccccctaaaggttgccccaagagcaccgtgtgactgctaaggtatttccggagtctaaagacgattattcaggtctcatttgcatacccataatacactgcaaacagtatttttttcggaaaaacatttatatattgcttgacatttttaagtatgagaattttgcatgcagaatttttttgtataaactttctcaggtagtaacccttgggattagtagacaccatcagtgtactaggaattgcagttacccgaaaattgagttacagaagtaactggtaatgatagggacttagggtgatagaagtgcaaagcatgactgtcaaatttttggagcaggttttctgacttcggtcggaaaacccctttcccttcttgtaatacaaaataataacaaccacagaggacatcgcaagtaaaatgtgtataacaaccccatctaaagaaccctatcatctttctactatctgtctacctaaatatgtatagtataaataaccctatatagcactctaagcaacttaagttaggtaacttagaaaactcttttttttttttgagactgagtctcactctgtcgcacccaggctggagtgcagtggcgtgatctcggctcactgcaacctccaccttctgggttcaagtgattctcccatctcagtctcccaagtagctgggattacaggcacgccaccatgccctgctacatttttttttttttagtagagatgaggtttcaccacattggccaggctgttctcgaactcctgacctcaggtgatccgcccaccttggcctcatgaagtgctgggattacaggtgtgagccactgtacccagccagaaaactcttaaaaaac

SEQ ID NO: 516 - DNA, 963 bp, synthetic construct
  source 1..963: mol_type = other DNA
gagacagggcttaaaagtcctgggcaattagctgggcacagtgtcgtgcgcctgtaatcccacctagttgggaggctgaggcagaagaatctcttgaacccgaggtagaggttgcagtgagccgagatcgcgccactgcactccagcctggatgacagagtgagaccctgtctcaaaaaaaaaaaaagtcctgggcagcaaggcctccacttcaccccctaaaggttgccccaagagcaccgtgtgactgctaaggtatttccggagtctaaagacgattattcaggtctcatttgcatacccataatacactgcaaacagtatttttttcggaaaaacatttatatattgcttgacatttttaagtatgagaattttgcatgcagaatttttttgtataaactttctcaggtagtaacccttgggattagtagacaccatcagtgtactaggaattgcagttacccgaaaattgagttacagaagtaactggtaatgatagggacttagggtgatagaagtgcaaagcatgactgtcaaatttttggagcaggttttctgacttcggtcggaaaacccctctgaattttcttgcagttgaacaacagaggctttttttgtgtgtgtgggggtgcttggttttgggaggttgaagagtacttgttcgcaaactctctaaatgagagatggggaagtgtcttaccagctgattcgcgagagcacctgcaagtttacctgttttagtgatttgcgtttatgaaagttggagttgctgattttgtgatctctacttttaaggtaaaagcagggcggtgttgacttttcttgccagttggctgtcctgttttctttctcgcactgttttctttttgagacgaagtctgtcgctcaggctggagtgcactggcgtgatctcggctcgctgcaaactttgccgaacccctgtttagcgatttccgtttg

SEQ ID NO: 517 - DNA, 1081 bp, synthetic construct
  source 1..1081: mol_type = other DNA
gagacagggcttaaaagtcctgggcaattagctgggcacagtgtcgtgcgcctgtaatcccacctagttgggaggctgaggcagaagaatctcttgaacccgaggtagaggttgcagtgagccgagatcgcgccactgcactccagcctggatgacagagtgagaccctgtctcaaaaaaaaaaaaagtcctgggcagcaaggcctccacttcaccccctaaaggttgccccaagagcaccgtgtgactgctaaggtatttccggagtctaaagacgattattcaggtctcatttgcatacccataatacactgcaaacagtatttttttcggaaaaacatttatatattgcttgacatttttaagtatgagaattttgcatgcagaatttttttgtataaactttctcaggtagtaacccttgggattagtagacaccatcagtgtactaggaattgcagttacccgaaaattgagttacagaagtaactggtaatgatagggacttagggtgatagaagtgcaaagcatgactgtcaaatttttggagcaggttttctgacttcggtcggaaaacccctatatgtggtaatccaacaatagaaattatttttaagtttgtgtgttcctttttctgttcaatggtgcttttgatattgttgtaaagcagtgactagcagattctgtgtggtaaaagcactgaaccctgtttagttcttttctccctaccttattggtaattatttctgtgtatatatgttccaaagaaatgcggcttgtatattcatgcttttcaactttttgtgatagacagttgatacacaagtagtacctcctccgggatcttcttagtcaagactgtttggtagatgcatgttttttgttacttgtaatgtacagtattcagttcattttctttttgcagcactgtccggttgaaacacaacgcgaggatcgggcgtggtggctcacgcctgtaatcccagcactttgggaggccgaggcaggacaatcaagaccaatcctggtcatcaaggcaggagaatcaagaccatcgaggtcaggagatcaagaccatcct

SEQ ID NO: 518 - DNA, 1079 bp, synthetic construct
  source 1..1079: mol_type = other DNA
gagacagggcttaaaagtcctgggcaattagctgggcacagtgtcgtgcgcctgtaatcccacctagttgggaggctgaggcagaagaatctcttgaacccgaggtagaggttgcagtgagccgagatcgcgccactgcactccagcctggatgacagagtgagaccctgtctcaaaaaaaaaaaaagtcctgggcagcaaggcctccacttcaccccctaaaggttgccccaagagcaccgtgtgactgctaaggtatttccggagtctaaagacgattattcaggtctcatttgcatacccataatacactgcaaacagtatttttttcggaaaaacatttatatattgcttgacatttttaagtatgagaattttgcatgcagaatttttttgtataaactttctcaggtagtaacccttgggattagtagacaccatcagtgtactaggaattgcagttacccgaaaattgagttacagaagtaactggtaatgatagggacttagggtgatagaagtgcaaagcatgactgtcaaatttttggagcaggttttctgacttcggtcggaaaacccctacatcaggttgtttttctgtttttacatcaggttgtttttctgtttggttttttttttacaccacgtttatacgccggtgcacggtttaccactgaaaacacctttcatctacaggtgatatcttttaacacaaataaaatgtagtagtcctaggagacggaatagaaggaggtggggcctaggcagattcatctctgcggtgcattttgcctctggccctcgggccctagtttgcgatctttcccatcttgcctctgcttccctctgcacaatcctgagtattgcagtaccttacacttaaggaaatttcgtcttgccaaagttgatccatttcagctccgaaacataacaggaactagtgcaacgataaacgtatgaggaacttgcaataagagtgacagaatcctttgaatcaaaaaaaaaaaaagccaccacttaatgagtatctaccatatgtcaagggcttcaccaatatttcattgaaatattccagacca

SEQ ID NO: 519 - DNA, 1081 bp, synthetic construct
  source 1..1081: mol_type = other DNA
gagacagggcttaaaagtcctgggcaattagctgggcacagtgtcgtgcgcctgtaatcccacctagttgggaggctgaggcagaagaatctcttgaacccgaggtagaggttgcagtgagccgagatcgcgccactgcactccagcctggatgacagagtgagaccctgtctcaaaaaaaaaaaaagtcctgggcagcaaggcctccacttcaccccctaaaggttgccccaagagcaccgtgtgactgctaaggtatttccggagtctaaagacgattattcaggtctcatttgcatacccataatacactgcaaacagtatttttttcggaaaaacatttatatattgcttgacatttttaagtatgagaattttgcatgcagaatttttttgtataaactttctcaggtagtaacccttgggattagtagacaccatcagtgtactaggaattgcagttacccgaaaattgagttacagaagtaactggtaatgatagggacttagggtgatagaagtgcaaagcatgactgtcaaatttttggagcaggttttctgacttcggtcggaaaacccctcttatgatgtttgttgccaatgatagattgttttcactgtgcaaaaattatgggtagttttggtggtcttgatgcagttgtaagcttggggtatgaaggtttgggccacgcctgggcgcttccggctgcgccggatgctgtttcctttccgctcccaggggcgttgggaacggttgtaggacgtggctctttattcgtgagttttccatttacctccgctgaacctagagcttcagacgccctatggcgtccgcctcgacccaaccggcggccttgagcgctgagcaagcaaagggtgagaatcgtcctagtcaaggcataggctgctggcctggggtagtcaaggcatgggctgctggtctggggaggatgcgggcggaggatgtggggcgacaaacctggctacgtccgccgggaaaatggggtaggggacgccgggtaccgtccttctaagtggggcgcttgcccccaagacttgggatcttattgggttacctaca

SEQ ID NO: 520 - DNA, 1079 bp, synthetic construct
  source 1..1079: mol_type = other DNA
gagacagggcttaaaagtcctgggcaattagctgggcacagtgtcgtgcgcctgtaatcccacctagttgggaggctgaggcagaagaatctcttgaacccgaggtagaggttgcagtgagccgagatcgcgccactgcactccagcctggatgacagagtgagaccctgtctcaaaaaaaaaaaaagtcctgggcagcaaggcctccacttcaccccctaaaggttgccccaagagcaccgtgtgactgctaaggtatttccggagtctaaagacgattattcaggtctcatttgcatacccataatacactgcaaacagtatttttttcggaaaaacatttatatattgcttgacatttttaagtatgagaattttgcatgcagaatttttttgtataaactttctcaggtagtaacccttgggattagtagacaccatcagtgtactaggaattgcagttacccgaaaattgagttacagaagtaactggtaatgatagggacttagggtgatagaagtgcaaagcatgactgtcaaatttttggagcaggttttctgacttcggtcggaaaaccccttctttactgttatatgttaggcgaaatattacgcgtttggagtaagtggtgctttttgtaactgaaaagagattctgtgtgtgtttttttttttttagaggctgcatagttatttgtatgaaccgcaggtgacctaattagcaaggtaattcagacctgtatcctagcacttaagaagtggaagtgggataaccctgcgtgttctcgtgtgggaggctagcttaagcaacaaagcaggaaggccccaccaacaaaagaatttaaaaattatacgtgcgtggtggcgcgcgtatgaggaaattatttggcaactgtgttacagtatagcagcaaatggaatagacctagtccctgactttaggagacctgcctcagccccccgaatggctgggactacaggcgtgcgcctccgcgcccagctaatttttgcatttttggtagagacgggttcaccatgttggccaggatggtctccatctcttcatctggtgatccgcc

SEQ ID NO: 521 - DNA, 1081 bp, synthetic construct
  source 1..1081: mol_type = other DNA
gagacagggcttaaaagtcctgggcaattagctgggcacagtgtcgtgcgcctgtaatcccacctagttgggaggctgaggcagaagaatctcttgaacccgaggtagaggttgcagtgagccgagatcgcgccactgcactccagcctggatgacagagtgagaccctgtctcaaaaaaaaaaaaagtcctgggcagcaaggcctccacttcaccccctaaaggttgccccaagagcaccgtgtgactgctaaggtatttccggagtctaaagacgattattcaggtctcatttgcatacccataatacactgcaaacagtatttttttcggaaaaacatttatatattgcttgacatttttaagtatgagaattttgcatgcagaatttttttgtataaactttctcaggtagtaacccttgggattagtagacaccatcagtgtactaggaattgcagttacccgaaaattgagttacagaagtaactggtaatgatagggacttagggtgatagaagtgcaaagcatgactgtcaaatttttggagcaggttttctgacttcggtcggaaaacccctaccttattcacgcctaaaaagtagactgactgtggggtggtcgtgttttttgtttcttgttggtaggtggtgaatgcgtttttttcgttgttttctccgttactcaggctgccagttgcttggcagtcttgtcgctggctgtggacgctctgcacttcatcaccgtccccagctgcgctttgagccggtctaaggttgcccacagtattgacgttgggacccacgaaactggcaatttccatgtgtgcggccttacccagttctcccaaacttctgcgtataaccgcttctctgtgcttcagaaagataagtccggccccggcctcacacagcagctcagttcgtgacagcgtttaatatgtaaaatggagcaaataatttatagggcgttgggagagttaaagagactaattcatttacgtgttaaatacagggaatggcttttgcattgatataaccccagcctccagcatgcgccagacctgacgtaggtgttcggc

SEQ ID NO: 522 - DNA, 1081 bp, synthetic construct
  source 1..1081: mol_type = other DNA
gagacagggcttaaaagtcctgggcaattagctgggcacagtgtcgtgcgcctgtaatcccacctagttgggaggctgaggcagaagaatctcttgaacccgaggtagaggttgcagtgagccgagatcgcgccactgcactccagcctggatgacagagtgagaccctgtctcaaaaaaaaaaaaagtcctgggcagcaaggcctccacttcaccccctaaaggttgccccaagagcaccgtgtgactgctaaggtatttccggagtctaaagacgattattcaggtctcatttgcatacccataatacactgcaaacagtatttttttcggaaaaacatttatatattgcttgacatttttaagtatgagaattttgcatgcagaatttttttgtataaactttctcaggtagtaacccttgggattagtagacaccatcagtgtactaggaattgcagttacccgaaaattgagttacagaagtaactggtaatgatagggacttagggtgatagaagtgcaaagcatgactgtcaaatttttggagcaggttttctgacttcggtcggaaaaccccttttgacccattacccatctaagttagatgcttttttaaatgttttttaatttttaaatttttaatttttttcattatttattttttatttttgagacggatctcggctcactgtaacctccacctcccgggttcaagcgattctcctgactcagcctcccgagtagctgggattacaggcgcgcgccaccatgcccggctaatttttctatttttagtaaagacggggtttcgccatgttgaccagggtggtcttgaactcctgacgtcaggtgatcctcctgcctcgtgctgggattgcaggcgtgagccaccgctcccggcccttagatgctttttaatcagcaagtacgcaatgctttcctgacaggaatgtcaagtccgtcaggaaatccacataagggtgttaagcaggcaaagtaccacatacagattaaaatcaaaagcactgtcaacgcttatttaatttatacagtagaccctaacttttctaattttgtg

SEQ ID NO: 523 - DNA, 1081 bp, synthetic construct
  source 1..1081: mol_type = other DNA
gagacagggcttaaaagtcctgggcaattagctgggcacagtgtcgtgcgcctgtaatcccacctagttgggaggctgaggcagaagaatctcttgaacccgaggtagaggttgcagtgagccgagatcgcgccactgcactccagcctggatgacagagtgagaccctgtctcaaaaaaaaaaaaagtcctgggcagcaaggcctccacttcaccccctaaaggttgccccaagagcaccgtgtgactgctaaggtatttccggagtctaaagacgattattcaggtctcatttgcatacccataatacactgcaaacagtatttttttcggaaaaacatttatatattgcttgacatttttaagtatgagaattttgcatgcagaatttttttgtataaactttctcaggtagtaacccttgggattagtagacaccatcagtgtactaggaattgcagttacccgaaaattgagttacagaagtaactggtaatgatagggacttagggtgatagaagtgcaaagcatgactgtcaaatttttggagcaggttttctgacttcggtcggaaaacccctgtttacttggttttaaaaatagcttgcactagcgataccgcgaatatggttattaggtttgttaggcacagtcgtgtcttactatagaaaaataacgtagtgttcattttgctgcctgtatgtgttaatttgtccttattgcgccattgttcttgttaagtcttctgtaaggagttgcgggtttcaaactgtcagtctgagagcataagctcacttttcagtcagttgaattgaatgttacattcgattggttctggatattgatattacccaaggcttgtcctgtttgtaagtcttttcctacacctgacaatatgattatgtttacaatgtccctagaactctgggtgtatcgttcccactgaataaaatttgatctctaagttgacctataaatttaagtaccaaaaaactggtttgtaagattttggaaggcagaggcagggaagagaccaacgtggtctacatataaagtaccaggtacatataaagtaccaggt

SEQ ID NO: 524 - DNA, 1077 bp, synthetic construct
  source 1..1077: mol_type = other DNA
gagacagggcttaaaagtcctgggcaattagctgggcacagtgtcgtgcgcctgtaatcccacctagttgggaggctgaggcagaagaatctcttgaacccgaggtagaggttgcagtgagccgagatcgcgccactgcactccagcctggatgacagagtgagaccctgtctcaaaaaaaaaaaaagtcctgggcagcaaggcctccacttcaccccctaaaggttgccccaagagcaccgtgtgactgctaaggtatttccggagtctaaagacgattattcaggtctcatttgcatacccataatacactgcaaacagtatttttttcggaaaaacatttatatattgcttgacatttttaagtatgagaattttgcatgcagaatttttttgtataaactttctcaggtagtaacccttgggattagtagacaccatcagtgtactaggaattgcagttacccgaaaattgagttacagaagtaactggtaatgatagggacttagggtgatagaagtgcaaagcatgactgtcaaatttttggagcaggttttctgacttcggtcggaaaacccctatttttgtggtgctaaaagttagattgcattccgcccttctcacgtctctttacgtgttgtttgcgaggcgtggcctcggaggtaaatggtctccttttacctcagataagcttacctttgctctgtgagtaagaatgtagctacacttccaaatttagctattgtcctttgcggtccaaatgaaaatattaccttccgatctaacaatgttaaactagtcccaggcccttctatcgattgccagaatagactagactactacacagacacaccctctcaaatcaggccagctcctgcaacctgcacctacagtttgtcccctgggacaaatgaaaggacaggccctctttcccccccccccccaaatcagagcacacacagatcttggggtctggggcagaaatttcgttcatggaaaaaacaaacaaacaaacaaacacgatcaaaggaagctcgttccctttggcctcagggtttcttagacgccgtgttccc

SEQ ID NO: 525 - DNA, 1078 bp, synthetic construct
  source 1..1078: mol_type = other DNA
gagacagggcttaaaagtcctgggcaattagctgggcacagtgtcgtgcgcctgtaatcccacctagttgggaggctgaggcagaagaatctcttgaacccgaggtagaggttgcagtgagccgagatcgcgccactgcactccagcctggatgacagagtgagaccctgtctcaaaaaaaaaaaaagtcctgggcagcaaggcctccacttcaccccctaaaggttgccccaagagcaccgtgtgactgctaaggtatttccggagtctaaagacgattattcaggtctcatttgcatacccataatacactgcaaacagtatttttttcggaaaaacatttatatattgcttgacatttttaagtatgagaattttgcatgcagaatttttttgtataaactttctcaggtagtaacccttgggattagtagacaccatcagtgtactaggaattgcagttacccgaaaattgagttacagaagtaactggtaatgatagggacttagggtgatagaagtgcaaagcatgactgtcaaatttttggagcaggttttctgacttcggtcggaaaacccctataactggtaaccaaaagcagattactttcccccttgtggtcttcgcgtttgcggacgggagagaactttcggccattttccttttagaaatttaacttcttgaaggccaccaggtgacccttacttccctctcacctttccttctacctgtactttctctattaaaaagcctgcagaagtacccttgacaaattgccaaaaatgacacctaaaaaaaaaaaaaggaaaaacgacaccttaggtaattataggttgtaagaaaaagatttgacctcttggagtttttatttcttaataccaaaggacacccaaggaacgtatctctcaaaattgggtttcaaacctcagccgtttccttcttagttccagtgcttaacacgcaacagacctgcacaccactacactgcatacgagttttaaagttaataaatcagtcacccctccatagtcttctacctacttgaagacagaaacggctgctaggaagcaattcttc

SEQ ID NO: 526 - DNA, 1081 bp, synthetic construct
  source 1..1081: mol_type = other DNA
gagacagggcttaaaagtcctgggcaattagctgggcacagtgtcgtgcgcctgtaatcccacctagttgggaggctgaggcagaagaatctcttgaacccgaggtagaggttgcagtgagccgagatcgcgccactgcactccagcctggatgacagagtgagaccctgtctcaaaaaaaaaaaaagtcctgggcagcaaggcctccacttcaccccctaaaggttgccccaagagcaccgtgtgactgctaaggtatttccggagtctaaagacgattattcaggtctcatttgcatacccataatacactgcaaacagtatttttttcggaaaaacatttatatattgcttgacatttttaagtatgagaattttgcatgcagaatttttttgtataaactttctcaggtagtaacccttgggattagtagacaccatcagtgtactaggaattgcagttacccgaaaattgagttacagaagtaactggtaatgatagggacttagggtgatagaagtgcaaagcatgactgtcaaatttttggagcaggttttctgacttcggtcggaaaacccctctggggaataagagtggtttaaagaaagaacaatttgagagatctgcttagatctaataaaacccaagtatagtttctttagacgtcttatatctcacgtaggacctcttatttcagactcactgcaagaacaagctaaagaactatatacagtcaggaacaaggtgagccatcgcggttctcagtcccatgatcttaagagtttttcctcttcccctcttccctggctgtcctggagctcactctgtagaccaggctggtctcaaactcagaaatccacttacctctgcctcccaagggctgggattaaaggcatgcaccaccattgcccggcagggtatgtggactatgctgtccttcaactcagagatcgtggtactttaaatctcattttccgaaagaaaagaaaagaaaggaaggggggaaataaagccagtatattttgcacccacaatctgaagttctacaaatattgttagaaaatgcaaaggacccaagtc

SEQ ID NO: 527 - DNA, 1081 bp, synthetic construct
  source 1..1081: mol_type = other DNA
gagacagggcttaaaagtcctgggcaattagctgggcacagtgtcgtgcgcctgtaatcccacctagttgggaggctgaggcagaagaatctcttgaacccgaggtagaggttgcagtgagccgagatcgcgccactgcactccagcctggatgacagagtgagaccctgtctcaaaaaaaaaaaaagtcctgggcagcaaggcctccacttcaccccctaaaggttgccccaagagcaccgtgtgactgctaaggtatttccggagtctaaagacgattattcaggtctcatttgcatacccataatacactgcaaacagtatttttttcggaaaaacatttatatattgcttgacatttttaagtatgagaattttgcatgcagaatttttttgtataaactttctcaggtagtaacccttgggattagtagacaccatcagtgtactaggaattgcagttacccgaaaattgagttacagaagtaactggtaatgatagggacttagggtgatagaagtgcaaagcatgactgtcaaatttttggagcaggttttctgacttcggtcggaaaacccctctcggtttatcttaaagggttttaaatatagaaagcttccttagtcttatgggtgagagtgctgtttaagccttacctaggtatgtctttgaacatttattacagattgttatttgtgactatgaccactcaggtgttctgttcttgtgaatttagacacactcagaaaggctacacactcaaagaccacaccaaagtgaagtactatctgggccgtgaaactggtcacatatcagttattttgcagtaaaacaaggaagtcaatcatactgcttcagtgggtcagggagtcaagaatgcacagtacaagagctggtgagattcctcagcaggtaagagcactgaatgctcttccaaagattctgagttcaaatcccagcaaccacgtggtggatttgaacaaaggatgaaaacaaccatccataaccagatctgatgccctcttctggagtgtcaaaagacagctatggtgtacttacataaataaataagtaaaaaca

SEQ ID NO: 528 - DNA, 1081 bp, synthetic construct
  source 1..1081: mol_type = other DNA
gagacagggcttaaaagtcctgggcaattagctgggcacagtgtcgtgcgcctgtaatcccacctagttgggaggctgaggcagaagaatctcttgaacccgaggtagaggttgcagtgagccgagatcgcgccactgcactccagcctggatgacagagtgagaccctgtctcaaaaaaaaaaaaagtcctgggcagcaaggcctccacttcaccccctaaaggttgccccaagagcaccgtgtgactgctaaggtatttccggagtctaaagacgattattcaggtctcatttgcatacccataatacactgcaaacagtatttttttcggaaaaacatttatatattgcttgacatttttaagtatgagaattttgcatgcagaatttttttgtataaactttctcaggtagtaacccttgggattagtagacaccatcagtgtactaggaattgcagttacccgaaaattgagttacagaagtaactggtaatgatagggacttagggtgatagaagtgcaaagcatgactgtcaaatttttggagcaggttttctgacttcggtcggaaaacccctccacattttgtgtttaaaaatagaaatatttaagtgagatcagtttaaatctgctttatctagggtgtctaactgcttgcatctttttaacttttccttatttgtgagaaggtctgtaaaacttattatatgttagtacactgtagctgtcttcagacactccagaagagggattcagatcaccttacagatggttttgagccaccatgtggttgctgggatttgaactcaggacctttagaaaagtagttgggtgctcttacccgctgagccatctcaccagccctttttttttcttttttccagttcgggtttctctgtgtgtagccctggctgtcctggaactcattctgtagaccgggctggcctcgaactcagaaatctgcctgcctctgcctcccaagtgctgggattaaaggaatgtgccttcattgcccggctctagggctttttgttgttgtttgtttgtttgtttgtttgtttgcttttgtggatggcct

SEQ ID NO: 529 - DNA, 1081 bp, synthetic construct
  source 1..1081: mol_type = other DNA
gagacagggcttaaaagtcctgggcaattagctgggcacagtgtcgtgcgcctgtaatcccacctagttgggaggctgaggcagaagaatctcttgaacccgaggtagaggttgcagtgagccgagatcgcgccactgcactccagcctggatgacagagtgagaccctgtctcaaaaaaaaaaaaagtcctgggcagcaaggcctccacttcaccccctaaaggttgccccaagagcaccgtgtgactgctaaggtatttccggagtctaaagacgattattcaggtctcatttgcatacccataatacactgcaaacagtatttttttcggaaaaacatttatatattgcttgacatttttaagtatgagaattttgcatgcagaatttttttgtataaactttctcaggtagtaacccttgggattagtagacaccatcagtgtactaggaattgcagttacccgaaaattgagttacagaagtaactggtaatgatagggacttagggtgatagaagtgcaaagcatgactgtcaaatttttggagcaggttttctgacttcggtcggaaaacccctaaaaccagtaagggagaaaggtcaagtaacatataaaggaaggcctatcagaattacaccagacttttcaccagagactatgaaagccagaagagcctggacagatgttatacagacactaagagaacacaaatgccagcccaggctactatacctggccaaactctcaattaccatagatggagaaaccaaagtattccacgacaaaaacaaattcacacaatatctttccacgaatccagcccttcaaaggataatgacagaaaagaagcaatacaaggacggaaatcacgccctagaacaaccaagaaactaatcattcaacaaaccaaaaagaagacagccacaagaacagaatgccaactctaacaacaaaaataaaaggaagcaacaattacttttccttaatatctcttaatatcaatggactcaattccccaataaaaagacatagactaacagactggctacacaaacaggacccaacattctgctgctta

SEQ ID NO: 530 - DNA, 1081 bp, synthetic construct
  source 1..1081: mol_type = other DNA
gagacagggcttaaaagtcctgggcaattagctgggcacagtgtcgtgcgcctgtaatcccacctagttgggaggctgaggcagaagaatctcttgaacccgaggtagaggttgcagtgagccgagatcgcgccactgcactccagcctggatgacagagtgagaccctgtctcaaaaaaaaaaaaagtcctgggcagcaaggcctccacttcaccccctaaaggttgccccaagagcaccgtgtgactgctaaggtatttccggagtctaaagacgattattcaggtctcatttgcatacccataatacactgcaaacagtatttttttcggaaaaacatttatatattgcttgacatttttaagtatgagaattttgcatgcagaatttttttgtataaactttctcaggtagtaacccttgggattagtagacaccatcagtgtactaggaattgcagttacccgaaaattgagttacagaagtaactggtaatgatagggacttagggtgatagaagtgcaaagcatgactgtcaaatttttggagcaggttttctgacttcggtcggaaaacccctcccaatttcactggtctacaatgaaagcaaaacagttctcttccccgctccccggtgtgtgagaggggctttgatccttctctggtttcctaggaaacgcgtatgtgctagagccacgctctgagacttccgcctcgtgcggtcccgcttcctttctgcctcctctggcctgcatccgtgggggaggtggctggctgcagggttctccggatctcttctgtgttcccactactcaagcaccgagtggcgttctatggcgtccgcctcggctcagcccgcggccctgagcgcggagcaggccaagggtgaggaaagagcctagtctgggtgtgggccgtcttctggggggagggcgcgatactattctttgcctctccaagtggggcccttgcccattagggcgaagggttgggaggacaagcttatcgggttgcttgcaggcctcggcccactaattccctgcctcttccctcctctgggctcgcccgccgtcctccgcg

SEQ ID NO: 531 - DNA, 1081 bp, synthetic construct
  source 1..1081: mol_type = other DNA
gagacagggcttaaaagtcctgggcaattagctgggcacagtgtcgtgcgcctgtaatcccacctagttgggaggctgaggcagaagaatctcttgaacccgaggtagaggttgcagtgagccgagatcgcgccactgcactccagcctggatgacagagtgagaccctgtctcaaaaaaaaaaaaagtcctgggcagcaaggcctccacttcaccccctaaaggttgccccaagagcaccgtgtgactgctaaggtatttccggagtctaaagacgattattcaggtctcatttgcatacccataatacactgcaaacagtatttttttcggaaaaacatttatatattgcttgacatttttaagtatgagaattttgcatgcagaatttttttgtataaactttctcaggtagtaacccttgggattagtagacaccatcagtgtactaggaattgcagttacccgaaaattgagttacagaagtaactggtaatgatagggacttagggtgatagaagtgcaaagcatgactgtcaaatttttggagcaggttttctgacttcggtcggaaaacccctgaatttgttaaattacaggaggaagcttttttagttcattttacaaatactttcttgttaggtagataataccttctaaggttattatctggatcttctaagtctttttatcgctagcaagtctaagtttctggactttggaattagaagttaatgtcgtaggcgggcatggtggtccacgcctttaatcccagagtttgggaggcagacgcaggtggttttctgagttcgaggccatcctgctcttcaatgttagttccaggacagccagggttatacaaagaaaccctgtctcgagaaacaaaacaaacaaaaaaagagtagctgagtgctctgagttgtctctccagccccttagctatttattttcatttaaattatttttgttttattcgcttgtgtgcctgagtttgaatttcccgggattaacagttgaagactagggctggtgagatggctcagcggttaagattgccgactgctcttccaaaggtcctgag

SEQ ID NO: 532 - DNA, 1081 bp, synthetic construct
  source 1..1081: mol_type = other DNA
gagacagggcttaaaagtcctgggcaattagctgggcacagtgtcgtgcgcctgtaatcccacctagttgggaggctgaggcagaagaatctcttgaacccgaggtagaggttgcagtgagccgagatcgcgccactgcactccagcctggatgacagagtgagaccctgtctcaaaaaaaaaaaaagtcctgggcagcaaggcctccacttcaccccctaaaggttgccccaagagcaccgtgtgactgctaaggtatttccggagtctaaagacgattattcaggtctcatttgcatacccataatacactgcaaacagtatttttttcggaaaaacatttatatattgcttgacatttttaagtatgagaattttgcatgcagaatttttttgtataaactttctcaggtagtaacccttgggattagtagacaccatcagtgtactaggaattgcagttacccgaaaattgagttacagaagtaactggtaatgatagggacttagggtgatagaagtgcaaagcatgactgtcaaatttttggagcaggttttctgacttcggtcggaaaacccctaccccctaattctacaagaatagaaagcttagcagctcctctgaatggttgctctcaggtgctagtggttgcaagtcgtatgttgatgcctgcctttgccctacctggtgtgtgagcgtgagcgcgccccacctctccagcctctctcttactgtttttcagacaagatgggactgttgttctcctactgctatgtacctcaatttcaattgatcatgcctggacataactgcccatgttgtaaggtcgtctacgttgtaaggtcgtgctcagtttctgatgcctagactagtcacctttccgtttgcctcctgactgtgtaaatgaggcaaatgaaggtggtctcttaactgacatgttagtgtttgacctatgggatagtttctcattgttgagacagaatttctagaagctggtccgctgagcggctaagagcacttgctgatattgcaaaggatctacctgggtttggttctcagcactcacatggaagttcacat

SEQ ID NO: 533 - DNA, 648 bp, synthetic construct
  source 1..648: mol_type = other DNA
gagacagggcttaaaagtcctgggcaattagctgggcacagtgtcgtgcgcctgtaatcccacctagttgggaggctgaggcagaagaatctcttgaacccgaggtagaggttgcagtgagccgagatcgcgccactgcactccagcctggatgacagagtgagaccctgtctcaaaaaaaaaaaaagtcctgggcagcaaggcctccacttcaccccctaaaggttgccccaagagcaccgtgtgactgctaaggtatttccggagtctaaagacgattattcaggtctcatttgcatacccataatacactgcaaacagtatttttttcggaaaaacatttatatattgcttgacatttttaagtatgagaattttgcatgcagaatttttttgtataaactttctcaggtagtaacccttgggattagtagacaccatcagtgtactaggaattgcagttacccgaaaattgagttacagaagtaactggtaatgatagggacttagggtgatagaagtgcaaagcatgactgtcaaatttttggagcaggttttctgacttcggtcggaaaaccccttgtagttcctgcaatttaattttcgtttaaaactttattttattctttaacttaaaaaaaatatata

SEQ ID NO: 534 - DNA, 1087 bp, synthetic construct
  source 1..1087: mol_type = other DNA
cgactcgcaaccttttcggggtcccgagtccaacacccgtgggaatcccatgggcaccatggcccctcgctccaaaaatgctttcgcgtcgcgcagacactgctcggtagtttcggggatcagcgtttgagtaagagcccgcgtctgaaccctccgcgccgccccggccccagtggaaagacgcgcaggcaaaacgcaccacgtgacggagcgtgaccgcgcgccgagcgcgcgccaaggtcgggcaggaagagggcctatttcccatgattccttcatatttgcatatacgatacaaggctgttagagagataattagaattaatttgactgtaaacacaaagatattagtacaaaatacgtgacgtagaaagtaataatttcttgggtagtttgcagttttaaaattatgttttaaaatggactatcatatgcttaccgtaacttgaaagtatttcgatttcttggctttatatatcttgtggaaaggacgaaacaccaatgatagggacttagggtgatagaagtgcaaagcatgactgtcaaatttttggagcaggttttctgacttcggtcggaaaacccctactttctggagtttcaaaaacagactgtacgccaagggtcatatctttttttgtattggtttgtgtcttggttggtgtcttaggtgttaatcctacagtggagggtttatgggaataggaagtaacatgtcgcctgcatgtcataggagaaaaagcgagcatcagccgtatcggctttgtaacacaaattagctatcgtgaagtccgctcagctcttccctttctaccctggctgctttttgcagggattggtccgtggtctccagtctcttgggttctcaccctgtgtgaaaatcttcgtgtttttccctaccccccagtcacctcttacacagcctctgcttccaagcgcagcccccacaggagtttgtaggatttctgtgctagcggggaatgtgttctcacctcatagagccaggtagaaattatgcagatgggcagttctctgggaagaaagcagggcctttggggctctcagtgtccccgttgggttgtagaca

SEQ ID NO: 535 - DNA, 1087 bp, synthetic construct
  source 1..1087: mol_type = other DNA
cgactcgcaaccttttcggggtcccgagtccaacacccgtgggaatcccatgggcaccatggcccctcgctccaaaaatgctttcgcgtcgcgcagacactgctcggtagtttcggggatcagcgtttgagtaagagcccgcgtctgaaccctccgcgccgccccggccccagtggaaagacgcgcaggcaaaacgcaccacgtgacggagcgtgaccgcgcgccgagcgcgcgccaaggtcgggcaggaagagggcctatttcccatgattccttcatatttgcatatacgatacaaggctgttagagagataattagaattaatttgactgtaaacacaaagatattagtacaaaatacgtgacgtagaaagtaataatttcttgggtagtttgcagttttaaaattatgttttaaaatggactatcatatgcttaccgtaacttgaaagtatttcgatttcttggctttatatatcttgtggaaaggacgaaacaccaatgatagggacttagggtgatagaagtgcaaagcatgactgtcaaatttttggagcaggttttctgacttcggtcggaaaacccctactttctggagtttctaaaagtagactgtacgctaagggtcatatctttttttgttttggtttgtgtcttggttggcgtcttaaatgttaatcctacagtggagggctggcgaataggaagtaacatgtcgcctgcacgccataggagaaaaagcgagcatcagccgtatcggctttgtaacacaaattagctatcgtgaagtccgctcagctcttccctttctaccctggctgctttttgcagggattggtccgtggtctccagtctcttgggttctcaccctgtgtgaaaatcttcctgtttttccctaccccccaagtcacctcttacacagcctctgcttccaagcgcagcccccacaggagtttgtaggatttctgtgctagcggggagtgtgttctcacctcatagagccaggtagaaactacgcagatgggtgctgttctccaggaagaaagcagggcctttggggctctcagtgtccccgttgggttgtaga

SEQ ID NO: 536 - DNA, 1087 bp, synthetic construct
  source 1..1087: mol_type = other DNA
cgactcgcaaccttttcggggtcccgagtccaacacccgtgggaatcccatgggcaccatggcccctcgctccaaaaatgctttcgcgtcgcgcagacactgctcggtagtttcggggatcagcgtttgagtaagagcccgcgtctgaaccctccgcgccgccccggccccagtggaaagacgcgcaggcaaaacgcaccacgtgacggagcgtgaccgcgcgccgagcgcgcgccaaggtcgggcaggaagagggcctatttcccatgattccttcatatttgcatatacgatacaaggctgttagagagataattagaattaatttgactgtaaacacaaagatattagtacaaaatacgtgacgtagaaagtaataatttcttgggtagtttgcagttttaaaattatgttttaaaatggactatcatatgcttaccgtaacttgaaagtatttcgatttcttggctttatatatcttgtggaaaggacgaaacaccaatgatagggacttagggtgatagaagtgcaaagcatgactgtcaaatttttggagcaggttttctgacttcggtcggaaaacccctactttctggagtttcaaaaacagaccgtacgccaagggtcatgtcttttttcgtattggtttgtgtcttagttgttaatcctacagtggaggcctggggaataagaagtaacatgtggcctgcacgccataggagaaaaagcgagcatcagccgtatcggctttgtaacacaaattagctatcgtgaagtccgctcagctcttccatttctaccctggctgctttttgcagggattggtccgtggtctccagtctcttgggttctcaccctgtgtgaaaatcttcgtgtttttccctaccccccaagtcacctcttacacagcctctgcttccaagcgcagcccccacaggagtttgtaggatttctgtgctagcggggagtgtgttctcacctcatagagccaggtagaaattatgcagatgggcgctgttctctgggaagaaagcagggcctttggggctctcagtgtccccgttgggttgtagacataacactctta

SEQ ID NO: 537 - DNA, 891 bp, synthetic construct
  source 1..891: mol_type = other DNA
cgactcgcaaccttttcggggtcccgagtccaacacccgtgggaatcccatgggcaccatggcccctcgctccaaaaatgctttcgcgtcgcgcagacactgctcggtagtttcggggatcagcgtttgagtaagagcccgcgtctgaaccctccgcgccgccccggccccagtggaaagacgcgcaggcaaaacgcaccacgtgacggagcgtgaccgcgcgccgagcgcgcgccaaggtcgggcaggaagagggcctatttcccatgattccttcatatttgcatatacgatacaaggctgttagagagataattagaattaatttgactgtaaacacaaagatattagtacaaaatacgtgacgtagaaagtaataatttcttgggtagtttgcagttttaaaattatgttttaaaatggactatcatatgcttaccgtaacttgaaagtatttcgatttcttggctttatatatcttgtggaaaggacgaaacaccaatgatagggacttagggtgatagaagtgcaaagcatgactgtcaaatttttggagcaggttttctgacttcggtcggaaaacccctcctccggggatacaacgtgtttcctaaaagtagagggaggtaagagacggtagcacctgcggggcggcttgcacgccgagtgcctgtgacgcgccggcttaacttaactgcttccctgaagtaccttgaggttcctgatgtgcgggcggtagacggtaggcttatgcggcacgctgtcgtttccaccgtggctactgcgctttgggaaggccacgacctcctcctttggggaggtccttaggatctcagcttggcagtcgagtgggtggcgaccttttaaaggaatgggacccacccggagttc

SEQ ID NO: 538 - DNA, 1079 bp, synthetic construct
  source 1..1079: mol_type = other DNA
cgactcgcaaccttttcggggtcccgagtccaacacccgtgggaatcccatgggcaccatggcccctcgctccaaaaatgctttcgcgtcgcgcagacactgctcggtagtttcggggatcagcgtttgagtaagagcccgcgtctgaaccctccgcgccgccccggccccagtggaaagacgcgcaggcaaaacgcaccacgtgacggagcgtgaccgcgcgccgagcgcgcgccaaggtcgggcaggaagagggcctatttcccatgattccttcatatttgcatatacgatacaaggctgttagagagataattagaattaatttgactgtaaacacaaagatattagtacaaaatacgtgacgtagaaagtaataatttcttgggtagtttgcagttttaaaattatgttttaaaatggactatcatatgcttaccgtaacttgaaagtatttcgatttcttggctttatatatcttgtggaaaggacgaaacaccaatgatagggacttagggtgatagaagtgcaaagcatgactgtcaaatttttggagcaggttttctgacttcggtcggaaaacccctttcccttcttgtaatacaaaataataacaaccacagaggacatcgcaagtaaaatgtgtataacaaccccatctaaagaaccctatcatctttctactatctgtctacctaaatatgtatagtataaataaccctatatagcactctaagcaacttaagttaggtaacttagaaaactcttttttttttttgagactgagtctcactctgtcgcacccaggctggagtgcagtggcgtgatctcggctcactgcaacctccaccttctgggttcaagtgattctcccatctcagtctcccaagtagctgggattacaggcacgccaccatgccctgctacatttttttttttttagtagagatgaggtttcaccacattggccaggctgttctcgaactcctgacctcaggtgatccgcccaccttggcctcatgaagtgctgggattacaggtgtgagccactgtacccagccagaaaactcttaaaaaac

SEQ ID NO: 539 - DNA, 969 bp, synthetic construct
  source 1..969: mol_type = other DNA
cgactcgcaaccttttcggggtcccgagtccaacacccgtgggaatcccatgggcaccatggcccctcgctccaaaaatgctttcgcgtcgcgcagacactgctcggtagtttcggggatcagcgtttgagtaagagcccgcgtctgaaccctccgcgccgccccggccccagtggaaagacgcgcaggcaaaacgcaccacgtgacggagcgtgaccgcgcgccgagcgcgcgccaaggtcgggcaggaagagggcctatttcccatgattccttcatatttgcatatacgatacaaggctgttagagagataattagaattaatttgactgtaaacacaaagatattagtacaaaatacgtgacgtagaaagtaataatttcttgggtagtttgcagttttaaaattatgttttaaaatggactatcatatgcttaccgtaacttgaaagtatttcgatttcttggctttatatatcttgtggaaaggacgaaacaccaatgatagggacttagggtgatagaagtgcaaagcatgactgtcaaatttttggagcaggttttctgacttcggtcggaaaacccctctgaattttcttgcagttgaacaacagaggctttttttgtgtgtgtgggggtgcttggttttgggaggttgaagagtacttgttcgcaaactctctaaatgagagatggggaagtgtcttaccagctgattcgcgagagcacctgcaagtttacctgttttagtgatttgcgtttatgaaagttggagttgctgattttgtgatctctacttttaaggtaaaagcagggcggtgttgacttttcttgccagttggctgtcctgttttctttctcgcactgttttctttttgagacgaagtctgtcgctcaggctggagtgcactggcgtgatctcggctcgctgcaaactttgccgaacccctgtttagcgatttccgtttg

SEQ ID NO: 540 - DNA, 1087 bp, synthetic construct
  source 1..1087: mol_type = other DNA
cgactcgcaaccttttcggggtcccgagtccaacacccgtgggaatcccatgggcaccatggcccctcgctccaaaaatgctttcgcgtcgcgcagacactgctcggtagtttcggggatcagcgtttgagtaagagcccgcgtctgaaccctccgcgccgccccggccccagtggaaagacgcgcaggcaaaacgcaccacgtgacggagcgtgaccgcgcgccgagcgcgcgccaaggtcgggcaggaagagggcctatttcccatgattccttcatatttgcatatacgatacaaggctgttagagagataattagaattaatttgactgtaaacacaaagatattagtacaaaatacgtgacgtagaaagtaataatttcttgggtagtttgcagttttaaaattatgttttaaaatggactatcatatgcttaccgtaacttgaaagtatttcgatttcttggctttatatatcttgtggaaaggacgaaacaccaatgatagggacttagggtgatagaagtgcaaagcatgactgtcaaatttttggagcaggttttctgacttcggtcggaaaacccctatatgtggtaatccaacaatagaaattatttttaagtttgtgtgttcctttttctgttcaatggtgcttttgatattgttgtaaagcagtgactagcagattctgtgtggtaaaagcactgaaccctgtttagttcttttctccctaccttattggtaattatttctgtgtatatatgttccaaagaaatgcggcttgtatattcatgcttttcaactttttgtgatagacagttgatacacaagtagtacctcctccgggatcttcttagtcaagactgtttggtagatgcatgttttttgttacttgtaatgtacagtattcagttcattttctttttgcagcactgtccggttgaaacacaacgcgaggatcgggcgtggtggctcacgcctgtaatcccagcactttgggaggccgaggcaggacaatcaagaccaatcctggtcatcaaggcaggagaatcaagaccatcgaggtcaggagatcaagaccatcct

SEQ ID NO: 541 - DNA, 1085 bp, synthetic construct
  source 1..1085: mol_type = other DNA
cgactcgcaaccttttcggggtcccgagtccaacacccgtgggaatcccatgggcaccatggcccctcgctccaaaaatgctttcgcgtcgcgcagacactgctcggtagtttcggggatcagcgtttgagtaagagcccgcgtctgaaccctccgcgccgccccggccccagtggaaagacgcgcaggcaaaacgcaccacgtgacggagcgtgaccgcgcgccgagcgcgcgccaaggtcgggcaggaagagggcctatttcccatgattccttcatatttgcatatacgatacaaggctgttagagagataattagaattaatttgactgtaaacacaaagatattagtacaaaatacgtgacgtagaaagtaataatttcttgggtagtttgcagttttaaaattatgttttaaaatggactatcatatgcttaccgtaacttgaaagtatttcgatttcttggctttatatatcttgtggaaaggacgaaacaccaatgatagggacttagggtgatagaagtgcaaagcatgactgtcaaatttttggagcaggttttctgacttcggtcggaaaacccctacatcaggttgtttttctgtttttacatcaggttgtttttctgtttggttttttttttacaccacgtttatacgccggtgcacggtttaccactgaaaacacctttcatctacaggtgatatcttttaacacaaataaaatgtagtagtcctaggagacggaatagaaggaggtggggcctaggcagattcatctctgcggtgcattttgcctctggccctcgggccctagtttgcgatctttcccatcttgcctctgcttccctctgcacaatcctgagtattgcagtaccttacacttaaggaaatttcgtcttgccaaagttgatccatttcagctccgaaacataacaggaactagtgcaacgataaacgtatgaggaacttgcaataagagtgacagaatcctttgaatcaaaaaaaaaaaaagccaccacttaatgagtatctaccatatgtcaagggcttcaccaatatttcattgaaatattccagacca

SEQ ID NO: 542 - DNA, 1087 bp, synthetic construct
  source 1..1087: mol_type = other DNA
cgactcgcaaccttttcggggtcccgagtccaacacccgtgggaatcccatgggcaccatggcccctcgctccaaaaatgctttcgcgtcgcgcagacactgctcggtagtttcggggatcagcgtttgagtaagagcccgcgtctgaaccctccgcgccgccccggccccagtggaaagacgcgcaggcaaaacgcaccacgtgacggagcgtgaccgcgcgccgagcgcgcgccaaggtcgggcaggaagagggcctatttcccatgattccttcatatttgcatatacgatacaaggctgttagagagataattagaattaatttgactgtaaacacaaagatattagtacaaaatacgtgacgtagaaagtaataatttcttgggtagtttgcagttttaaaattatgttttaaaatggactatcatatgcttaccgtaacttgaaagtatttcgatttcttggctttatatatcttgtggaaaggacgaaacaccaatgatagggacttagggtgatagaagtgcaaagcatgactgtcaaatttttggagcaggttttctgacttcggtcggaaaacccctcttatgatgtttgttgccaatgatagattgttttcactgtgcaaaaattatgggtagttttggtggtcttgatgcagttgtaagcttggggtatgaaggtttgggccacgcctgggcgcttccggctgcgccggatgctgtttcctttccgctcccaggggcgttgggaacggttgtaggacgtggctctttattcgtgagttttccatttacctccgctgaacctagagcttcagacgccctatggcgtccgcctcgacccaaccggcggccttgagcgctgagcaagcaaagggtgagaatcgtcctagtcaaggcataggctgctggcctggggtagtcaaggcatgggctgctggtctggggaggatgcgggcggaggatgtggggcgacaaacctggctacgtccgccgggaaaatggggtaggggacgccgggtaccgtccttctaagtggggcgcttgcccccaagacttgggatcttattgggttacctaca

SEQ ID NO: 543 - DNA, 1085 bp, synthetic construct
  source 1..1085: mol_type = other DNA
cgactcgcaaccttttcggggtcccgagtccaacacccgtgggaatcccatgggcaccatggcccctcgctccaaaaatgctttcgcgtcgcgcagacactgctcggtagtttcggggatcagcgtttgagtaagagcccgcgtctgaaccctccgcgccgccccggccccagtggaaagacgcgcaggcaaaacgcaccacgtgacggagcgtgaccgcgcgccgagcgcgcgccaaggtcgggcaggaagagggcctatttcccatgattccttcatatttgcatatacgatacaaggctgttagagagataattagaattaatttgactgtaaacacaaagatattagtacaaaatacgtgacgtagaaagtaataatttcttgggtagtttgcagttttaaaattatgttttaaaatggactatcatatgcttaccgtaacttgaaagtatttcgatttcttggctttatatatcttgtggaaaggacgaaacaccaatgatagggacttagggtgatagaagtgcaaagcatgactgtcaaatttttggagcaggttttctgacttcggtcggaaaaccccttctttactgttatatgttaggcgaaatattacgcgtttggagtaagtggtgctttttgtaactgaaaagagattctgtgtgtgtttttttttttttagaggctgcatagttatttgtatgaaccgcaggtgacctaattagcaaggtaattcagacctgtatcctagcacttaagaagtggaagtgggataaccctgcgtgttctcgtgtgggaggctagcttaagcaacaaagcaggaaggccccaccaacaaaagaatttaaaaattatacgtgcgtggtggcgcgcgtatgaggaaattatttggcaactgtgttacagtatagcagcaaatggaatagacctagtccctgactttaggagacctgcctcagccccccgaatggctgggactacaggcgtgcgcctccgcgcccagctaatttttgcatttttggtagagacgggttcaccatgttggccaggatggtctccatctcttcatctggtgatccgcc

SEQ ID NO: 544 - DNA, 1087 bp, synthetic construct
  source 1..1087: mol_type = other DNA
cgactcgcaaccttttcggggtcccgagtccaacacccgtgggaatcccatgggcaccatggcccctcgctccaaaaatgctttcgcgtcgcgcagacactgctcggtagtttcggggatcagcgtttgagtaagagcccgcgtctgaaccctccgcgccgccccggccccagtggaaagacgcgcaggcaaaacgcaccacgtgacggagcgtgaccgcgcgccgagcgcgcgccaaggtcgggcaggaagagggcctatttcccatgattccttcatatttgcatatacgatacaaggctgttagagagataattagaattaatttgactgtaaacacaaagatattagtacaaaatacgtgacgtagaaagtaataatttcttgggtagtttgcagttttaaaattatgttttaaaatggactatcatatgcttaccgtaacttgaaagtatttcgatttcttggctttatatatcttgtggaaaggacgaaacaccaatgatagggacttagggtgatagaagtgcaaagcatgactgtcaaatttttggagcaggttttctgacttcggtcggaaaacccctaccttattcacgcctaaaaagtagactgactgtggggtggtcgtgttttttgtttcttgttggtaggtggtgaatgcgtttttttcgttgttttctccgttactcaggctgccagttgcttggcagtcttgtcgctggctgtggacgctctgcacttcatcaccgtccccagctgcgctttgagccggtctaaggttgcccacagtattgacgttgggacccacgaaactggcaatttccatgtgtgcggccttacccagttctcccaaacttctgcgtataaccgcttctctgtgcttcagaaagataagtccggccccggcctcacacagcagctcagttcgtgacagcgtttaatatgtaaaatggagcaaataatttatagggcgttgggagagttaaagagactaattcatttacgtgttaaatacagggaatggcttttgcattgatataaccccagcctccagcatgcgccagacctgacgtaggtgttcggc

SEQ ID NO: 545 - DNA, 1087 bp, synthetic construct
  source 1..1087: mol_type = other DNA
cgactcgcaaccttttcggggtcccgagtccaacacccgtgggaatcccatgggcaccatggcccctcgctccaaaaatgctttcgcgtcgcgcagacactgctcggtagtttcggggatcagcgtttgagtaagagcccgcgtctgaaccctccgcgccgccccggccccagtggaaagacgcgcaggcaaaacgcaccacgtgacggagcgtgaccgcgcgccgagcgcgcgccaaggtcgggcaggaagagggcctatttcccatgattccttcatatttgcatatacgatacaaggctgttagagagataattagaattaatttgactgtaaacacaaagatattagtacaaaatacgtgacgtagaaagtaataatttcttgggtagtttgcagttttaaaattatgttttaaaatggactatcatatgcttaccgtaacttgaaagtatttcgatttcttggctttatatatcttgtggaaaggacgaaacaccaatgatagggacttagggtgatagaagtgcaaagcatgactgtcaaatttttggagcaggttttctgacttcggtcggaaaaccccttttgacccattacccatctaagttagatgcttttttaaatgttttttaatttttaaatttttaatttttttcattatttattttttatttttgagacggatctcggctcactgtaacctccacctcccgggttcaagcgattctcctgactcagcctcccgagtagctgggattacaggcgcgcgccaccatgcccggctaatttttctatttttagtaaagacggggtttcgccatgttgaccagggtggtcttgaactcctgacgtcaggtgatcctcctgcctcgtgctgggattgcaggcgtgagccaccgctcccggcccttagatgctttttaatcagcaagtacgcaatgctttcctgacaggaatgtcaagtccgtcaggaaatccacataagggtgttaagcaggcaaagtaccacatacagattaaaatcaaaagcactgtcaacgcttatttaatttatacagtagaccctaacttttctaattttgtg

SEQ ID NO: 546 - DNA, 1087 bp, synthetic construct
  source 1..1087: mol_type = other DNA
cgactcgcaaccttttcggggtcccgagtccaacacccgtgggaatcccatgggcaccatggcccctcgctccaaaaatgctttcgcgtcgcgcagacactgctcggtagtttcggggatcagcgtttgagtaagagcccgcgtctgaaccctccgcgccgccccggccccagtggaaagacgcgcaggcaaaacgcaccacgtgacggagcgtgaccgcgcgccgagcgcgcgccaaggtcgggcaggaagagggcctatttcccatgattccttcatatttgcatatacgatacaaggctgttagagagataattagaattaatttgactgtaaacacaaagatattagtacaaaatacgtgacgtagaaagtaataatttcttgggtagtttgcagttttaaaattatgttttaaaatggactatcatatgcttaccgtaacttgaaagtatttcgatttcttggctttatatatcttgtggaaaggacgaaacaccaatgatagggacttagggtgatagaagtgcaaagcatgactgtcaaatttttggagcaggttttctgacttcggtcggaaaacccctgtttacttggttttaaaaatagcttgcactagcgataccgcgaatatggttattaggtttgttaggcacagtcgtgtcttactatagaaaaataacgtagtgttcattttgctgcctgtatgtgttaatttgtccttattgcgccattgttcttgttaagtcttctgtaaggagttgcgggtttcaaactgtcagtctgagagcataagctcacttttcagtcagttgaattgaatgttacattcgattggttctggatattgatattacccaaggcttgtcctgtttgtaagtcttttcctacacctgacaatatgattatgtttacaatgtccctagaactctgggtgtatcgttcccactgaataaaatttgatctctaagttgacctataaatttaagtaccaaaaaactggtttgtaagattttggaaggcagaggcagggaagagaccaacgtggtctacatataaagtaccaggtacatataaagtaccaggt

SEQ ID NO: 547 - DNA, 1083 bp, synthetic construct
  source 1..1083: mol_type = other DNA
cgactcgcaaccttttcggggtcccgagtccaacacccgtgggaatcccatgggcaccatggcccctcgctccaaaaatgctttcgcgtcgcgcagacactgctcggtagtttcggggatcagcgtttgagtaagagcccgcgtctgaaccctccgcgccgccccggccccagtggaaagacgcgcaggcaaaacgcaccacgtgacggagcgtgaccgcgcgccgagcgcgcgccaaggtcgggcaggaagagggcctatttcccatgattccttcatatttgcatatacgatacaaggctgttagagagataattagaattaatttgactgtaaacacaaagatattagtacaaaatacgtgacgtagaaagtaataatttcttgggtagtttgcagttttaaaattatgttttaaaatggactatcatatgcttaccgtaacttgaaagtatttcgatttcttggctttatatatcttgtggaaaggacgaaacaccaatgatagggacttagggtgatagaagtgcaaagcatgactgtcaaatttttggagcaggttttctgacttcggtcggaaaacccctatttttgtggtgctaaaagttagattgcattccgcccttctcacgtctctttacgtgttgtttgcgaggcgtggcctcggaggtaaatggtctccttttacctcagataagcttacctttgctctgtgagtaagaatgtagctacacttccaaatttagctattgtcctttgcggtccaaatgaaaatattaccttccgatctaacaatgttaaactagtcccaggcccttctatcgattgccagaatagactagactactacacagacacaccctctcaaatcaggccagctcctgcaacctgcacctacagtttgtcccctgggacaaatgaaaggacaggccctctttcccccccccccccaaatcagagcacacacagatcttggggtctggggcagaaatttcgttcatggaaaaaacaaacaaacaaacaaacacgatcaaaggaagctcgttccctttggcctcagggtttcttagacgccgtgttccc

SEQ ID NO: 548 - DNA, 1084 bp, synthetic construct
  source 1..1084: mol_type = other DNA
cgactcgcaaccttttcggggtcccgagtccaacacccgtgggaatcccatgggcaccatggcccctcgctccaaaaatgctttcgcgtcgcgcagacactgctcggtagtttcggggatcagcgtttgagtaagagcccgcgtctgaaccctccgcgccgccccggccccagtggaaagacgcgcaggcaaaacgcaccacgtgacggagcgtgaccgcgcgccgagcgcgcgccaaggtcgggcaggaagagggcctatttcccatgattccttcatatttgcatatacgatacaaggctgttagagagataattagaattaatttgactgtaaacacaaagatattagtacaaaatacgtgacgtagaaagtaataatttcttgggtagtttgcagttttaaaattatgttttaaaatggactatcatatgcttaccgtaacttgaaagtatttcgatttcttggctttatatatcttgtggaaaggacgaaacaccaatgatagggacttagggtgatagaagtgcaaagcatgactgtcaaatttttggagcaggttttctgacttcggtcggaaaacccctataactggtaaccaaaagcagattactttcccccttgtggtcttcgcgtttgcggacgggagagaactttcggccattttccttttagaaatttaacttcttgaaggccaccaggtgacccttacttccctctcacctttccttctacctgtactttctctattaaaaagcctgcagaagtacccttgacaaattgccaaaaatgacacctaaaaaaaaaaaaaggaaaaacgacaccttaggtaattataggttgtaagaaaaagatttgacctcttggagtttttatttcttaataccaaaggacacccaaggaacgtatctctcaaaattgggtttcaaacctcagccgtttccttcttagttccagtgcttaacacgcaacagacctgcacaccactacactgcatacgagttttaaagttaataaatcagtcacccctccatagtcttctacctacttgaagacagaaacggctgctaggaagcaattcttc

SEQ ID NO: 549 - DNA, 1087 bp, synthetic construct
  source 1..1087: mol_type = other DNA
cgactcgcaaccttttcggggtcccgagtccaacacccgtgggaatcccatgggcaccatggcccctcgctccaaaaatgctttcgcgtcgcgcagacactgctcggtagtttcggggatcagcgtttgagtaagagcccgcgtctgaaccctccgcgccgccccggccccagtggaaagacgcgcaggcaaaacgcaccacgtgacggagcgtgaccgcgcgccgagcgcgcgccaaggtcgggcaggaagagggcctatttcccatgattccttcatatttgcatatacgatacaaggctgttagagagataattagaattaatttgactgtaaacacaaagatattagtacaaaatacgtgacgtagaaagtaataatttcttgggtagtttgcagttttaaaattatgttttaaaatggactatcatatgcttaccgtaacttgaaagtatttcgatttcttggctttatatatcttgtggaaaggacgaaacaccaatgatagggacttagggtgatagaagtgcaaagcatgactgtcaaatttttggagcaggttttctgacttcggtcggaaaacccctctggggaataagagtggtttaaagaaagaacaatttgagagatctgcttagatctaataaaacccaagtatagtttctttagacgtcttatatctcacgtaggacctcttatttcagactcactgcaagaacaagctaaagaactatatacagtcaggaacaaggtgagccatcgcggttctcagtcccatgatcttaagagtttttcctcttcccctcttccctggctgtcctggagctcactctgtagaccaggctggtctcaaactcagaaatccacttacctctgcctcccaagggctgggattaaaggcatgcaccaccattgcccggcagggtatgtggactatgctgtccttcaactcagagatcgtggtactttaaatctcattttccgaaagaaaagaaaagaaaggaaggggggaaataaagccagtatattttgcacccacaatctgaagttctacaaatattgttagaaaatgcaaaggacccaagtc

SEQ ID NO: 550 - DNA, 1087 bp, synthetic construct
  source 1..1087: mol_type = other DNA
cgactcgcaaccttttcggggtcccgagtccaacacccgtgggaatcccatgggcaccatggcccctcgctccaaaaatgctttcgcgtcgcgcagacactgctcggtagtttcggggatcagcgtttgagtaagagcccgcgtctgaaccctccgcgccgccccggccccagtggaaagacgcgcaggcaaaacgcaccacgtgacggagcgtgaccgcgcgccgagcgcgcgccaaggtcgggcaggaagagggcctatttcccatgattccttcatatttgcatatacgatacaaggctgttagagagataattagaattaatttgactgtaaacacaaagatattagtacaaaatacgtgacgtagaaagtaataatttcttgggtagtttgcagttttaaaattatgttttaaaatggactatcatatgcttaccgtaacttgaaagtatttcgatttcttggctttatatatcttgtggaaaggacgaaacaccaatgatagggacttagggtgatagaagtgcaaagcatgactgtcaaatttttggagcaggttttctgacttcggtcggaaaacccctctcggtttatcttaaagggttttaaatatagaaagcttccttagtcttatgggtgagagtgctgtttaagccttacctaggtatgtctttgaacatttattacagattgttatttgtgactatgaccactcaggtgttctgttcttgtgaatttagacacactcagaaaggctacacactcaaagaccacaccaaagtgaagtactatctgggccgtgaaactggtcacatatcagttattttgcagtaaaacaaggaagtcaatcatactgcttcagtgggtcagggagtcaagaatgcacagtacaagagctggtgagattcctcagcaggtaagagcactgaatgctcttccaaagattctgagttcaaatcccagcaaccacgtggtggatttgaacaaaggatgaaaacaaccatccataaccagatctgatgccctcttctggagtgtcaaaagacagctatggtgtacttacataaataaataagtaaaaaca

SEQ ID NO: 551 - DNA, 1087 bp, synthetic construct
  source 1..1087: mol_type = other DNA
cgactcgcaaccttttcggggtcccgagtccaacacccgtgggaatcccatgggcaccatggcccctcgctccaaaaatgctttcgcgtcgcgcagacactgctcggtagtttcggggatcagcgtttgagtaagagcccgcgtctgaaccctccgcgccgccccggccccagtggaaagacgcgcaggcaaaacgcaccacgtgacggagcgtgaccgcgcgccgagcgcgcgccaaggtcgggcaggaagagggcctatttcccatgattccttcatatttgcatatacgatacaaggctgttagagagataattagaattaatttgactgtaaacacaaagatattagtacaaaatacgtgacgtagaaagtaataatttcttgggtagtttgcagttttaaaattatgttttaaaatggactatcatatgcttaccgtaacttgaaagtatttcgatttcttggctttatatatcttgtggaaaggacgaaacaccaatgatagggacttagggtgatagaagtgcaaagcatgactgtcaaatttttggagcaggttttctgacttcggtcggaaaacccctccacattttgtgtttaaaaatagaaatatttaagtgagatcagtttaaatctgctttatctagggtgtctaactgcttgcatctttttaacttttccttatttgtgagaaggtctgtaaaacttattatatgttagtacactgtagctgtcttcagacactccagaagagggattcagatcaccttacagatggttttgagccaccatgtggttgctgggatttgaactcaggacctttagaaaagtagttgggtgctcttacccgctgagccatctcaccagccctttttttttcttttttccagttcgggtttctctgtgtgtagccctggctgtcctggaactcattctgtagaccgggctggcctcgaactcagaaatctgcctgcctctgcctcccaagtgctgggattaaaggaatgtgccttcattgcccggctctagggctttttgttgttgtttgtttgtttgtttgtttgtttgcttttgtggatggcct

SEQ ID NO: 552 - DNA, 1087 bp, synthetic construct
  source 1..1087: mol_type = other DNA
cgactcgcaaccttttcggggtcccgagtccaacacccgtgggaatcccatgggcaccatggcccctcgctccaaaaatgctttcgcgtcgcgcagacactgctcggtagtttcggggatcagcgtttgagtaagagcccgcgtctgaaccctccgcgccgccccggccccagtggaaagacgcgcaggcaaaacgcaccacgtgacggagcgtgaccgcgcgccgagcgcgcgccaaggtcgggcaggaagagggcctatttcccatgattccttcatatttgcatatacgatacaaggctgttagagagataattagaattaatttgactgtaaacacaaagatattagtacaaaatacgtgacgtagaaagtaataatttcttgggtagtttgcagttttaaaattatgttttaaaatggactatcatatgcttaccgtaacttgaaagtatttcgatttcttggctttatatatcttgtggaaaggacgaaacaccaatgatagggacttagggtgatagaagtgcaaagcatgactgtcaaatttttggagcaggttttctgacttcggtcggaaaacccctaaaaccagtaagggagaaaggtcaagtaacatataaaggaaggcctatcagaattacaccagacttttcaccagagactatgaaagccagaagagcctggacagatgttatacagacactaagagaacacaaatgccagcccaggctactatacctggccaaactctcaattaccatagatggagaaaccaaagtattccacgacaaaaacaaattcacacaatatctttccacgaatccagcccttcaaaggataatgacagaaaagaagcaatacaaggacggaaatcacgccctagaacaaccaagaaactaatcattcaacaaaccaaaaagaagacagccacaagaacagaatgccaactctaacaacaaaaataaaaggaagcaacaattacttttccttaatatctcttaatatcaatggactcaattccccaataaaaagacatagactaacagactggctacacaaacaggacccaacattctgctgctta

SEQ ID NO: 553 - DNA, 1087 bp, synthetic construct
  source 1..1087: mol_type = other DNA
cgactcgcaaccttttcggggtcccgagtccaacacccgtgggaatcccatgggcaccatggcccctcgctccaaaaatgctttcgcgtcgcgcagacactgctcggtagtttcggggatcagcgtttgagtaagagcccgcgtctgaaccctccgcgccgccccggccccagtggaaagacgcgcaggcaaaacgcaccacgtgacggagcgtgaccgcgcgccgagcgcgcgccaaggtcgggcaggaagagggcctatttcccatgattccttcatatttgcatatacgatacaaggctgttagagagataattagaattaatttgactgtaaacacaaagatattagtacaaaatacgtgacgtagaaagtaataatttcttgggtagtttgcagttttaaaattatgttttaaaatggactatcatatgcttaccgtaacttgaaagtatttcgatttcttggctttatatatcttgtggaaaggacgaaacaccaatgatagggacttagggtgatagaagtgcaaagcatgactgtcaaatttttggagcaggttttctgacttcggtcggaaaacccctcccaatttcactggtctacaatgaaagcaaaacagttctcttccccgctccccggtgtgtgagaggggctttgatccttctctggtttcctaggaaacgcgtatgtgctagagccacgctctgagacttccgcctcgtgcggtcccgcttcctttctgcctcctctggcctgcatccgtgggggaggtggctggctgcagggttctccggatctcttctgtgttcccactactcaagcaccgagtggcgttctatggcgtccgcctcggctcagcccgcggccctgagcgcggagcaggccaagggtgaggaaagagcctagtctgggtgtgggccgtcttctggggggagggcgcgatactattctttgcctctccaagtggggcccttgcccattagggcgaagggttgggaggacaagcttatcgggttgcttgcaggcctcggcccactaattccctgcctcttccctcctctgggctcgcccgccgtcctccgcg

SEQ ID NO: 554 - DNA, 1087 bp, synthetic construct
  source 1..1087: mol_type = other DNA
cgactcgcaaccttttcggggtcccgagtccaacacccgtgggaatcccatgggcaccatggcccctcgctccaaaaatgctttcgcgtcgcgcagacactgctcggtagtttcggggatcagcgtttgagtaagagcccgcgtctgaaccctccgcgccgccccggccccagtggaaagacgcgcaggcaaaacgcaccacgtgacggagcgtgaccgcgcgccgagcgcgcgccaaggtcgggcaggaagagggcctatttcccatgattccttcatatttgcatatacgatacaaggctgttagagagataattagaattaatttgactgtaaacacaaagatattagtacaaaatacgtgacgtagaaagtaataatttcttgggtagtttgcagttttaaaattatgttttaaaatggactatcatatgcttaccgtaacttgaaagtatttcgatttcttggctttatatatcttgtggaaaggacgaaacaccaatgatagggacttagggtgatagaagtgcaaagcatgactgtcaaatttttggagcaggttttctgacttcggtcggaaaacccctgaatttgttaaattacaggaggaagcttttttagttcattttacaaatactttcttgttaggtagataataccttctaaggttattatctggatcttctaagtctttttatcgctagcaagtctaagtttctggactttggaattagaagttaatgtcgtaggcgggcatggtggtccacgcctttaatcccagagtttgggaggcagacgcaggtggttttctgagttcgaggccatcctgctcttcaatgttagttccaggacagccagggttatacaaagaaaccctgtctcgagaaacaaaacaaacaaaaaaagagtagctgagtgctctgagttgtctctccagccccttagctatttattttcatttaaattatttttgttttattcgcttgtgtgcctgagtttgaatttcccgggattaacagttgaagactagggctggtgagatggctcagcggttaagattgccgactgctcttccaaaggtcctgag

SEQ ID NO: 555 - DNA, 1087 bp, synthetic construct
  source 1..1087: mol_type = other DNA
cgactcgcaaccttttcggggtcccgagtccaacacccgtgggaatcccatgggcaccatggcccctcgctccaaaaatgctttcgcgtcgcgcagacactgctcggtagtttcggggatcagcgtttgagtaagagcccgcgtctgaaccctccgcgccgccccggccccagtggaaagacgcgcaggcaaaacgcaccacgtgacggagcgtgaccgcgcgccgagcgcgcgccaaggtcgggcaggaagagggcctatttcccatgattccttcatatttgcatatacgatacaaggctgttagagagataattagaattaatttgactgtaaacacaaagatattagtacaaaatacgtgacgtagaaagtaataatttcttgggtagtttgcagttttaaaattatgttttaaaatggactatcatatgcttaccgtaacttgaaagtatttcgatttcttggctttatatatcttgtggaaaggacgaaacaccaatgatagggacttagggtgatagaagtgcaaagcatgactgtcaaatttttggagcaggttttctgacttcggtcggaaaacccctaccccctaattctacaagaatagaaagcttagcagctcctctgaatggttgctctcaggtgctagtggttgcaagtcgtatgttgatgcctgcctttgccctacctggtgtgtgagcgtgagcgcgccccacctctccagcctctctcttactgtttttcagacaagatgggactgttgttctcctactgctatgtacctcaatttcaattgatcatgcctggacataactgcccatgttgtaaggtcgtctacgttgtaaggtcgtgctcagtttctgatgcctagactagtcacctttccgtttgcctcctgactgtgtaaatgaggcaaatgaaggtggtctcttaactgacatgttagtgtttgacctatgggatagtttctcattgttgagacagaatttctagaagctggtccgctgagcggctaagagcacttgctgatattgcaaaggatctacctgggtttggttctcagcactcacatggaagttcacat

SEQ ID NO: 556 - DNA, 654 bp, synthetic construct
  source 1..654: mol_type = other DNA
cgactcgcaaccttttcggggtcccgagtccaacacccgtgggaatcccatgggcaccatggcccctcgctccaaaaatgctttcgcgtcgcgcagacactgctcggtagtttcggggatcagcgtttgagtaagagcccgcgtctgaaccctccgcgccgccccggccccagtggaaagacgcgcaggcaaaacgcaccacgtgacggagcgtgaccgcgcgccgagcgcgcgccaaggtcgggcaggaagagggcctatttcccatgattccttcatatttgcatatacgatacaaggctgttagagagataattagaattaatttgactgtaaacacaaagatattagtacaaaatacgtgacgtagaaagtaataatttcttgggtagtttgcagttttaaaattatgttttaaaatggactatcatatgcttaccgtaacttgaaagtatttcgatttcttggctttatatatcttgtggaaaggacgaaacaccaatgatagggacttagggtgatagaagtgcaaagcatgactgtcaaatttttggagcaggttttctgacttcggtcggaaaaccccttgtagttcctgcaatttaattttcgtttaaaactttattttattctttaacttaaaaaaaatatata

SEQ ID NO: 557 - DNA, 533 bp, synthetic construct; identical to SEQ ID NO: 365
  source 1..533: mol_type = other DNA

SEQ ID NO: 558 - DNA, 559 bp, synthetic construct; identical to SEQ ID NO: 366
  source 1..559: mol_type = other DNA

SEQ ID NO: 559 - DNA, 539 bp, synthetic construct; identical to SEQ ID NO: 367
  source 1..539: mol_type = other DNA

SEQ ID NO: 560 - DNA, 533 bp, synthetic construct; identical to SEQ ID NO: 368
  source 1..533: mol_type = other DNA

SEQ ID NO: 561 - DNA, 1087 bp, synthetic construct
  source 1..1087: mol_type = other DNA
caaagccggttatgaagcgggggtggggtgggctagttttaataggtccaggcgattagtacctggcatccttaaccacctacagtttgagaagggagtgggtgataaaagcctggaagggaagggaaatcgggccgggcattaggctccatcgctcatcaatagacaaggcctttaggaaactgcgacaacggcttttgctctgggcctttactgccgaatccaggtctccgggcttaacaacaacgaaggggctgtgactggctgctttctcaaccaatcagcaccgaactcatttgcatgggctgagaacaaatgttcgcgaactctagaaatgaatgacttaagtaagttccttagaatattatttttcctactgaaagttaccacatgcgtcgttgtttatacagtaataggaacaagaaaaaagtcacctaagctcaccctcatcaattgtggagttcctttatatcccatcttctctccaaacacatacgcagaatgatagggacttagggtgatagaagtgcaaagcatgactgtcaaatttttggagcaggttttctgacttcggtcggaaaacccctactttctggagtttcaaaaacagactgtacgccaagggtcatatctttttttgtattggtttgtgtcttggttggtgtcttaggtgttaatcctacagtggagggtttatgggaataggaagtaacatgtcgcctgcatgtcataggagaaaaagcgagcatcagccgtatcggctttgtaacacaaattagctatcgtgaagtccgctcagctcttccctttctaccctggctgctttttgcagggattggtccgtggtctccagtctcttgggttctcaccctgtgtgaaaatcttcgtgtttttccctaccccccagtcacctcttacacagcctctgcttccaagcgcagcccccacaggagtttgtaggatttctgtgctagcggggaatgtgttctcacctcatagagccaggtagaaattatgcagatgggcagttctctgggaagaaagcagggcctttggggctctcagtgtccccgttgggttgtagaca

SEQ ID NO: 562 - DNA, 1087 bp, synthetic construct
  source 1..1087: mol_type = other DNA
caaagccggttatgaagcgggggtggggtgggctagttttaataggtccaggcgattagtacctggcatccttaaccacctacagtttgagaagggagtgggtgataaaagcctggaagggaagggaaatcgggccgggcattaggctccatcgctcatcaatagacaaggcctttaggaaactgcgacaacggcttttgctctgggcctttactgccgaatccaggtctccgggcttaacaacaacgaaggggctgtgactggctgctttctcaaccaatcagcaccgaactcatttgcatgggctgagaacaaatgttcgcgaactctagaaatgaatgacttaagtaagttccttagaatattatttttcctactgaaagttaccacatgcgtcgttgtttatacagtaataggaacaagaaaaaagtcacctaagctcaccctcatcaattgtggagttcctttatatcccatcttctctccaaacacatacgcagaatgatagggacttagggtgatagaagtgcaaagcatgactgtcaaatttttggagcaggttttctgacttcggtcggaaaacccctactttctggagtttctaaaagtagactgtacgctaagggtcatatctttttttgttttggtttgtgtcttggttggcgtcttaaatgttaatcctacagtggagggctggcgaataggaagtaacatgtcgcctgcacgccataggagaaaaagcgagcatcagccgtatcggctttgtaacacaaattagctatcgtgaagtccgctcagctcttccctttctaccctggctgctttttgcagggattggtccgtggtctccagtctcttgggttctcaccctgtgtgaaaatcttcctgtttttccctaccccccaagtcacctcttacacagcctctgcttccaagcgcagcccccacaggagtttgtaggatttctgtgctagcggggagtgtgttctcacctcatagagccaggtagaaactacgcagatgggtgctgttctccaggaagaaagcagggcctttggggctctcagtgtccccgttgggttgtaga

SEQ ID NO: 563 - DNA, 1087 bp, synthetic construct
  source 1..1087: mol_type = other DNA
caaagccggttatgaagcgggggtggggtgggctagttttaataggtccaggcgattagtacctggcatccttaaccacctacagtttgagaagggagtgggtgataaaagcctggaagggaagggaaatcgggccgggcattaggctccatcgctcatcaatagacaaggcctttaggaaactgcgacaacggcttttgctctgggcctttactgccgaatccaggtctccgggcttaacaacaacgaaggggctgtgactggctgctttctcaaccaatcagcaccgaactcatttgcatgggctgagaacaaatgttcgcgaactctagaaatgaatgacttaagtaagttccttagaatattatttttcctactgaaagttaccacatgcgtcgttgtttatacagtaataggaacaagaaaaaagtcacctaagctcaccctcatcaattgtggagttcctttatatcccatcttctctccaaacacatacgcagaatgatagggacttagggtgatagaagtgcaaagcatgactgtcaaatttttggagcaggttttctgacttcggtcggaaaacccctactttctggagtttcaaaaacagaccgtacgccaagggtcatgtcttttttcgtattggtttgtgtcttagttgttaatcctacagtggaggcctggggaataagaagtaacatgtggcctgcacgccataggagaaaaagcgagcatcagccgtatcggctttgtaacacaaattagctatcgtgaagtccgctcagctcttccatttctaccctggctgctttttgcagggattggtccgtggtctccagtctcttgggttctcaccctgtgtgaaaatcttcgtgtttttccctaccccccaagtcacctcttacacagcctctgcttccaagcgcagcccccacaggagtttgtaggatttctgtgctagcggggagtgtgttctcacctcatagagccaggtagaaattatgcagatgggcgctgttctctgggaagaaagcagggcctttggggctctcagtgtccccgttgggttgtagacataacactctta

SEQ ID NO: 564 - DNA, 891 bp, synthetic construct
  source 1..891: mol_type = other DNA
caaagccggttatgaagcgggggtggggtgggctagttttaataggtccaggcgattagtacctggcatccttaaccacctacagtttgagaagggagtgggtgataaaagcctggaagggaagggaaatcgggccgggcattaggctccatcgctcatcaatagacaaggcctttaggaaactgcgacaacggcttttgctctgggcctttactgccgaatccaggtctccgggcttaacaacaacgaaggggctgtgactggctgctttctcaaccaatcagcaccgaactcatttgcatgggctgagaacaaatgttcgcgaactctagaaatgaatgacttaagtaagttccttagaatattatttttcctactgaaagttaccacatgcgtcgttgtttatacagtaataggaacaagaaaaaagtcacctaagctcaccctcatcaattgtggagttcctttatatcccatcttctctccaaacacatacgcagaatgatagggacttagggtgatagaagtgcaaagcatgactgtcaaatttttggagcaggttttctgacttcggtcggaaaacccctcctccggggatacaacgtgtttcctaaaagtagagggaggtaagagacggtagcacctgcggggcggcttgcacgccgagtgcctgtgacgcgccggcttaacttaactgcttccctgaagtaccttgaggttcctgatgtgcgggcggtagacggtaggcttatgcggcacgctgtcgtttccaccgtggctactgcgctttgggaaggccacgacctcctcctttggggaggtccttaggatctcagcttggcagtcgagtgggtggcgaccttttaaaggaatgggacccacccggagttc

SEQ ID NO: 565 - DNA, 1079 bp, synthetic construct
  source 1..1079: mol_type = other DNA
caaagccggttatgaagcgggggtggggtgggctagttttaataggtccaggcgattagtacctggcatccttaaccacctacagtttgagaagggagtgggtgataaaagcctggaagggaagggaaatcgggccgggcattaggctccatcgctcatcaatagacaaggcctttaggaaactgcgacaacggcttttgctctgggcctttactgccgaatccaggtctccgggcttaacaacaacgaaggggctgtgactggctgctttctcaaccaatcagcaccgaactcatttgcatgggctgagaacaaatgttcgcgaactctagaaatgaatgacttaagtaagttccttagaatattatttttcctactgaaagttaccacatgcgtcgttgtttatacagtaataggaacaagaaaaaagtcacctaagctcaccctcatcaattgtggagttcctttatatcccatcttctctccaaacacatacgcagaatgatagggacttagggtgatagaagtgcaaagcatgactgtcaaatttttggagcaggttttctgacttcggtcggaaaacccctttcccttcttgtaatacaaaataataacaaccacagaggacatcgcaagtaaaatgtgtataacaaccccatctaaagaaccctatcatctttctactatctgtctacctaaatatgtatagtataaataaccctatatagcactctaagcaacttaagttaggtaacttagaaaactcttttttttttttgagactgagtctcactctgtcgcacccaggctggagtgcagtggcgtgatctcggctcactgcaacctccaccttctgggttcaagtgattctcccatctcagtctcccaagtagctgggattacaggcacgccaccatgccctgctacatttttttttttttagtagagatgaggtttcaccacattggccaggctgttctcgaactcctgacctcaggtgatccgcccaccttggcctcatgaagtgctgggattacaggtgtgagccactgtacccagccagaaaactcttaaaaaac

SEQ ID NO: 566 - DNA, 969 bp, synthetic construct
  source 1..969: mol_type = other DNA
caaagccggttatgaagcgggggtggggtgggctagttttaataggtccaggcgattagtacctggcatccttaaccacctacagtttgagaagggagtgggtgataaaagcctggaagggaagggaaatcgggccgggcattaggctccatcgctcatcaatagacaaggcctttaggaaactgcgacaacggcttttgctctgggcctttactgccgaatccaggtctccgggcttaacaacaacgaaggggctgtgactggctgctttctcaaccaatcagcaccgaactcatttgcatgggctgagaacaaatgttcgcgaactctagaaatgaatgacttaagtaagttccttagaatattatttttcctactgaaagttaccacatgcgtcgttgtttatacagtaataggaacaagaaaaaagtcacctaagctcaccctcatcaattgtggagttcctttatatcccatcttctctccaaacacatacgcagaatgatagggacttagggtgatagaagtgcaaagcatgactgtcaaatttttggagcaggttttctgacttcggtcggaaaacccctctgaattttcttgcagttgaacaacagaggctttttttgtgtgtgtgggggtgcttggttttgggaggttgaagagtacttgttcgcaaactctctaaatgagagatggggaagtgtcttaccagctgattcgcgagagcacctgcaagtttacctgttttagtgatttgcgtttatgaaagttggagttgctgattttgtgatctctacttttaaggtaaaagcagggcggtgttgacttttcttgccagttggctgtcctgttttctttctcgcactgttttctttttgagacgaagtctgtcgctcaggctggagtgcactggcgtgatctcggctcgctgcaaactttgccgaacccctgtttagcgatttccgtttg

SEQ ID NO: 567 - DNA, 1087 bp, synthetic construct
  source 1..1087: mol_type = other DNA
caaagccggttatgaagcgggggtggggtgggctagttttaataggtccaggcgattagtacctggcatccttaaccacctacagtttgagaagggagtgggtgataaaagcctggaagggaagggaaatcgggccgggcattaggctccatcgctcatcaatagacaaggcctttaggaaactgcgacaacggcttttgctctgggcctttactgccgaatccaggtctccgggcttaacaacaacgaaggggctgtgactggctgctttctcaaccaatcagcaccgaactcatttgcatgggctgagaacaaatgttcgcgaactctagaaatgaatgacttaagtaagttccttagaatattatttttcctactgaaagttaccacatgcgtcgttgtttatacagtaataggaacaagaaaaaagtcacctaagctcaccctcatcaattgtggagttcctttatatcccatcttctctccaaacacatacgcagaatgatagggacttagggtgatagaagtgcaaagcatgactgtcaaatttttggagcaggttttctgacttcggtcggaaaacccctatatgtggtaatccaacaatagaaattatttttaagtttgtgtgttcctttttctgttcaatggtgcttttgatattgttgtaaagcagtgactagcagattctgtgtggtaaaagcactgaaccctgtttagttcttttctccctaccttattggtaattatttctgtgtatatatgttccaaagaaatgcggcttgtatattcatgcttttcaactttttgtgatagacagttgatacacaagtagtacctcctccgggatcttcttagtcaagactgtttggtagatgcatgttttttgttacttgtaatgtacagtattcagttcattttctttttgcagcactgtccggttgaaacacaacgcgaggatcgggcgtggtggctcacgcctgtaatcccagcactttgggaggccgaggcaggacaatcaagaccaatcctggtcatcaaggcaggagaatcaagaccatcgaggtcaggagatcaagaccatcct

SEQ ID NO: 568 - DNA, 1085 bp, synthetic construct
  source 1..1085: mol_type = other DNA
caaagccggttatgaagcgggggtggggtgggctagttttaataggtccaggcgattagtacctggcatccttaaccacctacagtttgagaagggagtgggtgataaaagcctggaagggaagggaaatcgggccgggcattaggctccatcgctcatcaatagacaaggcctttaggaaactgcgacaacggcttttgctctgggcctttactgccgaatccaggtctccgggcttaacaacaacgaaggggctgtgactggctgctttctcaaccaatcagcaccgaactcatttgcatgggctgagaacaaatgttcgcgaactctagaaatgaatgacttaagtaagttccttagaatattatttttcctactgaaagttaccacatgcgtcgttgtttatacagtaataggaacaagaaaaaagtcacctaagctcaccctcatcaattgtggagttcctttatatcccatcttctctccaaacacatacgcagaatgatagggacttagggtgatagaagtgcaaagcatgactgtcaaatttttggagcaggttttctgacttcggtcggaaaacccctacatcaggttgtttttctgtttttacatcaggttgtttttctgtttggttttttttttacaccacgtttatacgccggtgcacggtttaccactgaaaacacctttcatctacaggtgatatcttttaacacaaataaaatgtagtagtcctaggagacggaatagaaggaggtggggcctaggcagattcatctctgcggtgcattttgcctctggccctcgggccctagtttgcgatctttcccatcttgcctctgcttccctctgcacaatcctgagtattgcagtaccttacacttaaggaaatttcgtcttgccaaagttgatccatttcagctccgaaacataacaggaactagtgcaacgataaacgtatgaggaacttgcaataagagtgacagaatcctttgaatcaaaaaaaaaaaaagccaccacttaatgagtatctaccatatgtcaagggcttcaccaatatttcattgaaatattccagacca

SEQ ID NO: 569 - DNA, 1087 bp, synthetic construct
  source 1..1087: mol_type = other DNA
caaagccggttatgaagcgggggtggggtgggctagttttaataggtccaggcgattagtacctggcatccttaaccacctacagtttgagaagggagtgggtgataaaagcctggaagggaagggaaatcgggccgggcattaggctccatcgctcatcaatagacaaggcctttaggaaactgcgacaacggcttttgctctgggcctttactgccgaatccaggtctccgggcttaacaacaacgaaggggctgtgactggctgctttctcaaccaatcagcaccgaactcatttgcatgggctgagaacaaatgttcgcgaactctagaaatgaatgacttaagtaagttccttagaatattatttttcctactgaaagttaccacatgcgtcgttgtttatacagtaataggaacaagaaaaaagtcacctaagctcaccctcatcaattgtggagttcctttatatcccatcttctctccaaacacatacgcagaatgatagggacttagggtgatagaagtgcaaagcatgactgtcaaatttttggagcaggttttctgacttcggtcggaaaacccctcttatgatgtttgttgccaatgatagattgttttcactgtgcaaaaattatgggtagttttggtggtcttgatgcagttgtaagcttggggtatgaaggtttgggccacgcctgggcgcttccggctgcgccggatgctgtttcctttccgctcccaggggcgttgggaacggttgtaggacgtggctctttattcgtgagttttccatttacctccgctgaacctagagcttcagacgccctatggcgtccgcctcgacccaaccggcggccttgagcgctgagcaagcaaagggtgagaatcgtcctagtcaaggcataggctgctggcctggggtagtcaaggcatgggctgctggtctggggaggatgcgggcggaggatgtggggcgacaaacctggctacgtccgccgggaaaatggggtaggggacgccgggtaccgtccttctaagtggggcgcttgcccccaagacttgggatcttattgggttacctaca

SEQ ID NO: 570 - DNA, 1085 bp, synthetic construct
  source 1..1085: mol_type = other DNA
caaagccggttatgaagcgggggtggggtgggctagttttaataggtccaggcgattagtacctggcatccttaaccacctacagtttgagaagggagtgggtgataaaagcctggaagggaagggaaatcgggccgggcattaggctccatcgctcatcaatagacaaggcctttaggaaactgcgacaacggcttttgctctgggcctttactgccgaatccaggtctccgggcttaacaacaacgaaggggctgtgactggctgctttctcaaccaatcagcaccgaactcatttgcatgggctgagaacaaatgttcgcgaactctagaaatgaatgacttaagtaagttccttagaatattatttttcctactgaaagttaccacatgcgtcgttgtttatacagtaataggaacaagaaaaaagtcacctaagctcaccctcatcaattgtggagttcctttatatcccatcttctctccaaacacatacgcagaatgatagggacttagggtgatagaagtgcaaagcatgactgtcaaatttttggagcaggttttctgacttcggtcggaaaaccccttctttactgttatatgttaggcgaaatattacgcgtttggagtaagtggtgctttttgtaactgaaaagagattctgtgtgtgtttttttttttttagaggctgcatagttatttgtatgaaccgcaggtgacctaattagcaaggtaattcagacctgtatcctagcacttaagaagtggaagtgggataaccctgcgtgttctcgtgtgggaggctagcttaagcaacaaagcaggaaggccccaccaacaaaagaatttaaaaattatacgtgcgtggtggcgcgcgtatgaggaaattatttggcaactgtgttacagtatagcagcaaatggaatagacctagtccctgactttaggagacctgcctcagccccccgaatggctgggactacaggcgtgcgcctccgcgcccagctaatttttgcatttttggtagagacgggttcaccatgttggccaggatggtctccatctcttcatctggtgatccgcc

SEQ ID NO: 571 - DNA, 1087 bp, synthetic construct
  source 1..1087: mol_type = other DNA
caaagccggttatgaagcgggggtggggtgggctagttttaataggtccaggcgattagtacctggcatccttaaccacctacagtttgagaagggagtgggtgataaaagcctggaagggaagggaaatcgggccgggcattaggctccatcgctcatcaatagacaaggcctttaggaaactgcgacaacggcttttgctctgggcctttactgccgaatccaggtctccgggcttaacaacaacgaaggggctgtgactggctgctttctcaaccaatcagcaccgaactcatttgcatgggctgagaacaaatgttcgcgaactctagaaatgaatgacttaagtaagttccttagaatattatttttcctactgaaagttaccacatgcgtcgttgtttatacagtaataggaacaagaaaaaagtcacctaagctcaccctcatcaattgtggagttcctttatatcccatcttctctccaaacacatacgcagaatgatagggacttagggtgatagaagtgcaaagcatgactgtcaaatttttggagcaggttttctgacttcggtcggaaaacccctaccttattcacgcctaaaaagtagactgactgtggggtggtcgtgttttttgtttcttgttggtaggtggtgaatgcgtttttttcgttgttttctccgttactcaggctgccagttgcttggcagtcttgtcgctggctgtggacgctctgcacttcatcaccgtccccagctgcgctttgagccggtctaaggttgcccacagtattgacgttgggacccacgaaactggcaatttccatgtgtgcggccttacccagttctcccaaacttctgcgtataaccgcttctctgtgcttcagaaagataagtccggccccggcctcacacagcagctcagttcgtgacagcgtttaatatgtaaaatggagcaaataatttatagggcgttgggagagttaaagagactaattcatttacgtgttaaatacagggaatggcttttgcattgatataaccccagcctccagcatgcgccagacctgacgtaggtgttcggc

SEQ ID NO: 572 - DNA, 1087 bp, synthetic construct
  source 1..1087: mol_type = other DNA
caaagccggttatgaagcgggggtggggtgggctagttttaataggtccaggcgattagtacctggcatccttaaccacctacagtttgagaagggagtgggtgataaaagcctggaagggaagggaaatcgggccgggcattaggctccatcgctcatcaatagacaaggcctttaggaaactgcgacaacggcttttgctctgggcctttactgccgaatccaggtctccgggcttaacaacaacgaaggggctgtgactggctgctttctcaaccaatcagcaccgaactcatttgcatgggctgagaacaaatgttcgcgaactctagaaatgaatgacttaagtaagttccttagaatattatttttcctactgaaagttaccacatgcgtcgttgtttatacagtaataggaacaagaaaaaagtcacctaagctcaccctcatcaattgtggagttcctttatatcccatcttctctccaaacacatacgcagaatgatagggacttagggtgatagaagtgcaaagcatgactgtcaaatttttggagcaggttttctgacttcggtcggaaaaccccttttgacccattacccatctaagttagatgcttttttaaatgttttttaatttttaaatttttaatttttttcattatttattttttatttttgagacggatctcggctcactgtaacctccacctcccgggttcaagcgattctcctgactcagcctcccgagtagctgggattacaggcgcgcgccaccatgcccggctaatttttctatttttagtaaagacggggtttcgccatgttgaccagggtggtcttgaactcctgacgtcaggtgatcctcctgcctcgtgctgggattgcaggcgtgagccaccgctcccggcccttagatgctttttaatcagcaagtacgcaatgctttcctgacaggaatgtcaagtccgtcaggaaatccacataagggtgttaagcaggcaaagtaccacatacagattaaaatcaaaagcactgtcaacgcttatttaatttatacagtagaccctaacttttctaattttgtg

SEQ ID NO: 573 - DNA, 1087 bp, synthetic construct
  source 1..1087: mol_type = other DNA
caaagccggttatgaagcgggggtggggtgggctagttttaataggtccaggcgattagtacctggcatccttaaccacctacagtttgagaagggagtgggtgataaaagcctggaagggaagggaaatcgggccgggcattaggctccatcgctcatcaatagacaaggcctttaggaaactgcgacaacggcttttgctctgggcctttactgccgaatccaggtctccgggcttaacaacaacgaaggggctgtgactggctgctttctcaaccaatcagcaccgaactcatttgcatgggctgagaacaaatgttcgcgaactctagaaatgaatgacttaagtaagttccttagaatattatttttcctactgaaagttaccacatgcgtcgttgtttatacagtaataggaacaagaaaaaagtcacctaagctcaccctcatcaattgtggagttcctttatatcccatcttctctccaaacacatacgcagaatgatagggacttagggtgatagaagtgcaaagcatgactgtcaaatttttggagcaggttttctgacttcggtcggaaaacccctgtttacttggttttaaaaatagcttgcactagcgataccgcgaatatggttattaggtttgttaggcacagtcgtgtcttactatagaaaaataacgtagtgttcattttgctgcctgtatgtgttaatttgtccttattgcgccattgttcttgttaagtcttctgtaaggagttgcgggtttcaaactgtcagtctgagagcataagctcacttttcagtcagttgaattgaatgttacattcgattggttctggatattgatattacccaaggcttgtcctgtttgtaagtcttttcctacacctgacaatatgattatgtttacaatgtccctagaactctgggtgtatcgttcccactgaataaaatttgatctctaagttgacctataaatttaagtaccaaaaaactggtttgtaagattttggaaggcagaggcagggaagagaccaacgtggtctacatataaagtaccaggtacatataaagtaccaggt

SEQ ID NO: 574 - DNA, 1083 bp, synthetic construct
  source 1..1083: mol_type = other DNA
caaagccggttatgaagcgggggtggggtgggctagttttaataggtccaggcgattagtacctggcatccttaaccacctacagtttgagaagggagtgggtgataaaagcctggaagggaagggaaatcgggccgggcattaggctccatcgctcatcaatagacaaggcctttaggaaactgcgacaacggcttttgctctgggcctttactgccgaatccaggtctccgggcttaacaacaacgaaggggctgtgactggctgctttctcaaccaatcagcaccgaactcatttgcatgggctgagaacaaatgttcgcgaactctagaaatgaatgacttaagtaagttccttagaatattatttttcctactgaaagttaccacatgcgtcgttgtttatacagtaataggaacaagaaaaaagtcacctaagctcaccctcatcaattgtggagttcctttatatcccatcttctctccaaacacatacgcagaatgatagggacttagggtgatagaagtgcaaagcatgactgtcaaatttttggagcaggttttctgacttcggtcggaaaacccctatttttgtggtgctaaaagttagattgcattccgcccttctcacgtctctttacgtgttgtttgcgaggcgtggcctcggaggtaaatggtctccttttacctcagataagcttacctttgctctgtgagtaagaatgtagctacacttccaaatttagctattgtcctttgcggtccaaatgaaaatattaccttccgatctaacaatgttaaactagtcccaggcccttctatcgattgccagaatagactagactactacacagacacaccctctcaaatcaggccagctcctgcaacctgcacctacagtttgtcccctgggacaaatgaaaggacaggccctctttcccccccccccccaaatcagagcacacacagatcttggggtctggggcagaaatttcgttcatggaaaaaacaaacaaacaaacaaacacgatcaaaggaagctcgttccctttggcctcagggtttcttagacgccgtgttccc

SEQ ID NO: 575 - DNA, 1084 bp, synthetic construct
  source 1..1084: mol_type = other DNA
caaagccggttatgaagcgggggtggggtgggctagttttaataggtccaggcgattagtacctggcatccttaaccacctacagtttgagaagggagtgggtgataaaagcctggaagggaagggaaatcgggccgggcattaggctccatcgctcatcaatagacaaggcctttaggaaactgcgacaacggcttttgctctgggcctttactgccgaatccaggtctccgggcttaacaacaacgaaggggctgtgactggctgctttctcaaccaatcagcaccgaactcatttgcatgggctgagaacaaatgttcgcgaactctagaaatgaatgacttaagtaagttccttagaatattatttttcctactgaaagttaccacatgcgtcgttgtttatacagtaataggaacaagaaaaaagtcacctaagctcaccctcatcaattgtggagttcctttatatcccatcttctctccaaacacatacgcagaatgatagggacttagggtgatagaagtgcaaagcatgactgtcaaatttttggagcaggttttctgacttcggtcggaaaacccctataactggtaaccaaaagcagattactttcccccttgtggtcttcgcgtttgcggacgggagagaactttcggccattttccttttagaaatttaacttcttgaaggccaccaggtgacccttacttccctctcacctttccttctacctgtactttctctattaaaaagcctgcagaagtacccttgacaaattgccaaaaatgacacctaaaaaaaaaaaaaggaaaaacgacaccttaggtaattataggttgtaagaaaaagatttgacctcttggagtttttatttcttaataccaaaggacacccaaggaacgtatctctcaaaattgggtttcaaacctcagccgtttccttcttagttccagtgcttaacacgcaacagacctgcacaccactacactgcatacgagttttaaagttaataaatcagtcacccctccatagtcttctacctacttgaagacagaaacggctgctaggaagcaattcttc

SEQ ID NO: 576 - DNA, 1087 bp, synthetic construct
  source 1..1087: mol_type = other DNA
caaagccggttatgaagcgggggtggggtgggctagttttaataggtccaggcgattagtacctggcatccttaaccacctacagtttgagaagggagtgggtgataaaagcctggaagggaagggaaatcgggccgggcattaggctccatcgctcatcaatagacaaggcctttaggaaactgcgacaacggcttttgctctgggcctttactgccgaatccaggtctccgggcttaacaacaacgaaggggctgtgactggctgctttctcaaccaatcagcaccgaactcatttgcatgggctgagaacaaatgttcgcgaactctagaaatgaatgacttaagtaagttccttagaatattatttttcctactgaaagttaccacatgcgtcgttgtttatacagtaataggaacaagaaaaaagtcacctaagctcaccctcatcaattgtggagttcctttatatcccatcttctctccaaacacatacgcagaatgatagggacttagggtgatagaagtgcaaagcatgactgtcaaatttttggagcaggttttctgacttcggtcggaaaacccctctggggaataagagtggtttaaagaaagaacaatttgagagatctgcttagatctaataaaacccaagtatagtttctttagacgtcttatatctcacgtaggacctcttatttcagactcactgcaagaacaagctaaagaactatatacagtcaggaacaaggtgagccatcgcggttctcagtcccatgatcttaagagtttttcctcttcccctcttccctggctgtcctggagctcactctgtagaccaggctggtctcaaactcagaaatccacttacctctgcctcccaagggctgggattaaaggcatgcaccaccattgcccggcagggtatgtggactatgctgtccttcaactcagagatcgtggtactttaaatctcattttccgaaagaaaagaaaagaaaggaaggggggaaataaagccagtatattttgcacccacaatctgaagttctacaaatattgttagaaaatgcaaaggacccaagtc

SEQ ID NO: 577 - DNA, 1087 bp, synthetic construct
  source 1..1087: mol_type = other DNA
caaagccggttatgaagcgggggtggggtgggctagttttaataggtccaggcgattagtacctggcatccttaaccacctacagtttgagaagggagtgggtgataaaagcctggaagggaagggaaatcgggccgggcattaggctccatcgctcatcaatagacaaggcctttaggaaactgcgacaacggcttttgctctgggcctttactgccgaatccaggtctccgggcttaacaacaacgaaggggctgtgactggctgctttctcaaccaatcagcaccgaactcatttgcatgggctgagaacaaatgttcgcgaactctagaaatgaatgacttaagtaagttccttagaatattatttttcctactgaaagttaccacatgcgtcgttgtttatacagtaataggaacaagaaaaaagtcacctaagctcaccctcatcaattgtggagttcctttatatcccatcttctctccaaacacatacgcagaatgatagggacttagggtgatagaagtgcaaagcatgactgtcaaatttttggagcaggttttctgacttcggtcggaaaacccctctcggtttatcttaaagggttttaaatatagaaagcttccttagtcttatgggtgagagtgctgtttaagccttacctaggtatgtctttgaacatttattacagattgttatttgtgactatgaccactcaggtgttctgttcttgtgaatttagacacactcagaaaggctacacactcaaagaccacaccaaagtgaagtactatctgggccgtgaaactggtcacatatcagttattttgcagtaaaacaaggaagtcaatcatactgcttcagtgggtcagggagtcaagaatgcacagtacaagagctggtgagattcctcagcaggtaagagcactgaatgctcttccaaagattctgagttcaaatcccagcaaccacgtggtggatttgaacaaaggatgaaaacaaccatccataaccagatctgatgccctcttctggagtgtcaaaagacagctatggtgtacttacataaataaataagtaaaaaca

SEQ ID NO: 578 - DNA, 1087 bp, synthetic construct
  source 1..1087: mol_type = other DNA
caaagccggttatgaagcgggggtggggtgggctagttttaataggtccaggcgattagtacctggcatccttaaccacctacagtttgagaagggagtgggtgataaaagcctggaagggaagggaaatcgggccgggcattaggctccatcgctcatcaatagacaaggcctttaggaaactgcgacaacggcttttgctctgggcctttactgccgaatccaggtctccgggcttaacaacaacgaaggggctgtgactggctgctttctcaaccaatcagcaccgaactcatttgcatgggctgagaacaaatgttcgcgaactctagaaatgaatgacttaagtaagttccttagaatattatttttcctactgaaagttaccacatgcgtcgttgtttatacagtaataggaacaagaaaaaagtcacctaagctcaccctcatcaattgtggagttcctttatatcccatcttctctccaaacacatacgcagaatgatagggacttagggtgatagaagtgcaaagcatgactgtcaaatttttggagcaggttttctgacttcggtcggaaaacccctccacattttgtgtttaaaaatagaaatatttaagtgagatcagtttaaatctgctttatctagggtgtctaactgcttgcatctttttaacttttccttatttgtgagaaggtctgtaaaacttattatatgttagtacactgtagctgtcttcagacactccagaagagggattcagatcaccttacagatggttttgagccaccatgtggttgctgggatttgaactcaggacctttagaaaagtagttgggtgctcttacccgctgagccatctcaccagccctttttttttcttttttccagttcgggtttctctgtgtgtagccctggctgtcctggaactcattctgtagaccgggctggcctcgaactcagaaatctgcctgcctctgcctcccaagtgctgggattaaaggaatgtgccttcattgcccggctctagggctttttgttgttgtttgtttgtttgtttgtttgtttgcttttgtggatggcct

SEQ ID NO: 579 - DNA, 1087 bp, synthetic construct
  source 1..1087: mol_type = other DNA
caaagccggttatgaagcgggggtggggtgggctagttttaataggtccaggcgattagtacctggcatccttaaccacctacagtttgagaagggagtgggtgataaaagcctggaagggaagggaaatcgggccgggcattaggctccatcgctcatcaatagacaaggcctttaggaaactgcgacaacggcttttgctctgggcctttactgccgaatccaggtctccgggcttaacaacaacgaaggggctgtgactggctgctttctcaaccaatcagcaccgaactcatttgcatgggctgagaacaaatgttcgcgaactctagaaatgaatgacttaagtaagttccttagaatattatttttcctactgaaagttaccacatgcgtcgttgtttatacagtaataggaacaagaaaaaagtcacctaagctcaccctcatcaattgtggagttcctttatatcccatcttctctccaaacacatacgcagaatgatagggacttagggtgatagaagtgcaaagcatgactgtcaaatttttggagcaggttttctgacttcggtcggaaaacccctaaaaccagtaagggagaaaggtcaagtaacatataaaggaaggcctatcagaattacaccagacttttcaccagagactatgaaagccagaagagcctggacagatgttatacagacactaagagaacacaaatgccagcccaggctactatacctggccaaactctcaattaccatagatggagaaaccaaagtattccacgacaaaaacaaattcacacaatatctttccacgaatccagcccttcaaaggataatgacagaaaagaagcaatacaaggacggaaatcacgccctagaacaaccaagaaactaatcattcaacaaaccaaaaagaagacagccacaagaacagaatgccaactctaacaacaaaaataaaaggaagcaacaattacttttccttaatatctcttaatatcaatggactcaattccccaataaaaagacatagactaacagactggctacacaaacaggacccaacattctgctgctta

SEQ ID NO: 580 - DNA, 1087 bp, synthetic construct
  source 1..1087: mol_type = other DNA
caaagccggttatgaagcgggggtggggtgggctagttttaataggtccaggcgattagtacctggcatccttaaccacctacagtttgagaagggagtgggtgataaaagcctggaagggaagggaaatcgggccgggcattaggctccatcgctcatcaatagacaaggcctttaggaaactgcgacaacggcttttgctctgggcctttactgccgaatccaggtctccgggcttaacaacaacgaaggggctgtgactggctgctttctcaaccaatcagcaccgaactcatttgcatgggctgagaacaaatgttcgcgaactctagaaatgaatgacttaagtaagttccttagaatattatttttcctactgaaagttaccacatgcgtcgttgtttatacagtaataggaacaagaaaaaagtcacctaagctcaccctcatcaattgtggagttcctttatatcccatcttctctccaaacacatacgcagaatgatagggacttagggtgatagaagtgcaaagcatgactgtcaaatttttggagcaggttttctgacttcggtcggaaaacccctcccaatttcactggtctacaatgaaagcaaaacagttctcttccccgctccccggtgtgtgagaggggctttgatccttctctggtttcctaggaaacgcgtatgtgctagagccacgctctgagacttccgcctcgtgcggtcccgcttcctttctgcctcctctggcctgcatccgtgggggaggtggctggctgcagggttctccggatctcttctgtgttcccactactcaagcaccgagtggcgttctatggcgtccgcctcggctcagcccgcggccctgagcgcggagcaggccaagggtgaggaaagagcctagtctgggtgtgggccgtcttctggggggagggcgcgatactattctttgcctctccaagtggggcccttgcccattagggcgaagggttgggaggacaagcttatcgggttgcttgcaggcctcggcccactaattccctgcctcttccctcctctgggctcgcccgccgtcctccgcg

SEQ ID NO: 581 - DNA, 1087 bp, synthetic construct
  source 1..1087: mol_type = other DNA
caaagccggttatgaagcgggggtggggtgggctagttttaataggtccaggcgattagtacctggcatccttaaccacctacagtttgagaagggagtgggtgataaaagcctggaagggaagggaaatcgggccgggcattaggctccatcgctcatcaatagacaaggcctttaggaaactgcgacaacggcttttgctctgggcctttactgccgaatccaggtctccgggcttaacaacaacgaaggggctgtgactggctgctttctcaaccaatcagcaccgaactcatttgcatgggctgagaacaaatgttcgcgaactctagaaatgaatgacttaagtaagttccttagaatattatttttcctactgaaagttaccacatgcgtcgttgtttatacagtaataggaacaagaaaaaagtcacctaagctcaccctcatcaattgtggagttcctttatatcccatcttctctccaaacacatacgcagaatgatagggacttagggtgatagaagtgcaaagcatgactgtcaaatttttggagcaggttttctgacttcggtcggaaaacccctgaatttgttaaattacaggaggaagcttttttagttcattttacaaatactttcttgttaggtagataataccttctaaggttattatctggatcttctaagtctttttatcgctagcaagtctaagtttctggactttggaattagaagttaatgtcgtaggcgggcatggtggtccacgcctttaatcccagagtttgggaggcagacgcaggtggttttctgagttcgaggccatcctgctcttcaatgttagttccaggacagccagggttatacaaagaaaccctgtctcgagaaacaaaacaaacaaaaaaagagtagctgagtgctctgagttgtctctccagccccttagctatttattttcatttaaattatttttgttttattcgcttgtgtgcctgagtttgaatttcccgggattaacagttgaagactagggctggtgagatggctcagcggttaagattgccgactgctcttccaaaggtcctgag

SEQ ID NO: 582 - DNA, 1087 bp, synthetic construct
  source 1..1087: mol_type = other DNA
caaagccggttatgaagcgggggtggggtgggctagttttaataggtccaggcgattagtacctggcatccttaaccacctacagtttgagaagggagtgggtgataaaagcctggaagggaagggaaatcgggccgggcattaggctccatcgctcatcaatagacaaggcctttaggaaactgcgacaacggcttttgctctgggcctttactgccgaatccaggtctccgggcttaacaacaacgaaggggctgtgactggctgctttctcaaccaatcagcaccgaactcatttgcatgggctgagaacaaatgttcgcgaactctagaaatgaatgacttaagtaagttccttagaatattatttttcctactgaaagttaccacatgcgtcgttgtttatacagtaataggaacaagaaaaaagtcacctaagctcaccctcatcaattgtggagttcctttatatcccatcttctctccaaacacatacgcagaatgatagggacttagggtgatagaagtgcaaagcatgactgtcaaatttttggagcaggttttctgacttcggtcggaaaacccctaccccctaattctacaagaatagaaagcttagcagctcctctgaatggttgctctcaggtgctagtggttgcaagtcgtatgttgatgcctgcctttgccctacctggtgtgtgagcgtgagcgcgccccacctctccagcctctctcttactgtttttcagacaagatgggactgttgttctcctactgctatgtacctcaatttcaattgatcatgcctggacataactgcccatgttgtaaggtcgtctacgttgtaaggtcgtgctcagtttctgatgcctagactagtcacctttccgtttgcctcctgactgtgtaaatgaggcaaatgaaggtggtctcttaactgacatgttagtgtttgacctatgggatagtttctcattgttgagacagaatttctagaagctggtccgctgagcggctaagagcacttgctgatattgcaaaggatctacctgggtttggttctcagcactcacatggaagttcacat

SEQ ID NO: 583 - DNA, 654 bp, synthetic construct
  source 1..654: mol_type = other DNA
caaagccggttatgaagcgggggtggggtgggctagttttaataggtccaggcgattagtacctggcatccttaaccacctacagtttgagaagggagtgggtgataaaagcctggaagggaagggaaatcgggccgggcattaggctccatcgctcatcaatagacaaggcctttaggaaactgcgacaacggcttttgctctgggcctttactgccgaatccaggtctccgggcttaacaacaacgaaggggctgtgactggctgctttctcaaccaatcagcaccgaactcatttgcatgggctgagaacaaatgttcgcgaactctagaaatgaatgacttaagtaagttccttagaatattatttttcctactgaaagttaccacatgcgtcgttgtttatacagtaataggaacaagaaaaaagtcacctaagctcaccctcatcaattgtggagttcctttatatcccatcttctctccaaacacatacgcagaatgatagggacttagggtgatagaagtgcaaagcatgactgtcaaatttttggagcaggttttctgacttcggtcggaaaaccccttgtagttcctgcaatttaattttcgtttaaaactttattttattctttaacttaaaaaaaatatata

SEQ ID NO: 584 - DNA, 1087 bp, synthetic construct
  source 1..1087: mol_type = other DNA
cacgcctgcctgggctgctccaaggtggtggctaggggtggcacaagttacacattttcaatttggataggttgtgattcttgtcttccccagtcagatacctacagccgctgagagccggtattccaacgccatgagacgccttctgtcgtgagcagttgacaagaaagacccagcacttactgcaaccggaaggagcggttcctccctcgctcgcgcagccgctcttccccgccactccctcggtgcccgccagcacattcccagcaagccctgagtatatttgcatatcaactcactacatttttttcttctaactaaaaaatcgaaaggacaaattccagattctccttgtgaagtcttcctttcagttcagaagaaatggaattcgctcttcaacttcaggaagttgaaataaagagttgcttggattttgtgttcacctttaccaaaaaatggatttggtaacactgccaccctgctttggtgacagagaaagcaatgatagggacttagggtgatagaagtgcaaagcatgactgtcaaatttttggagcaggttttctgacttcggtcggaaaacccctactttctggagtttcaaaaacagactgtacgccaagggtcatatctttttttgtattggtttgtgtcttggttggtgtcttaggtgttaatcctacagtggagggtttatgggaataggaagtaacatgtcgcctgcatgtcataggagaaaaagcgagcatcagccgtatcggctttgtaacacaaattagctatcgtgaagtccgctcagctcttccctttctaccctggctgctttttgcagggattggtccgtggtctccagtctcttgggttctcaccctgtgtgaaaatcttcgtgtttttccctaccccccagtcacctcttacacagcctctgcttccaagcgcagcccccacaggagtttgtaggatttctgtgctagcggggaatgtgttctcacctcatagagccaggtagaaattatgcagatgggcagttctctgggaagaaagcagggcctttggggctctcagtgtccccgttgggttgtagaca

SEQ ID NO: 585 - DNA, 1087 bp, synthetic construct
  source 1..1087: mol_type = other DNA
cacgcctgcctgggctgctccaaggtggtggctaggggtggcacaagttacacattttcaatttggataggttgtgattcttgtcttccccagtcagatacctacagccgctgagagccggtattccaacgccatgagacgccttctgtcgtgagcagttgacaagaaagacccagcacttactgcaaccggaaggagcggttcctccctcgctcgcgcagccgctcttccccgccactccctcggtgcccgccagcacattcccagcaagccctgagtatatttgcatatcaactcactacatttttttcttctaactaaaaaatcgaaaggacaaattccagattctccttgtgaagtcttcctttcagttcagaagaaatggaattcgctcttcaacttcaggaagttgaaataaagagttgcttggattttgtgttcacctttaccaaaaaatggatttggtaacactgccaccctgctttggtgacagagaaagcaatgatagggacttagggtgatagaagtgcaaagcatgactgtcaaatttttggagcaggttttctgacttcggtcggaaaacccctactttctggagtttctaaaagtagactgtacgctaagggtcatatctttttttgttttggtttgtgtcttggttggcgtcttaaatgttaatcctacagtggagggctggcgaataggaagtaacatgtcgcctgcacgccataggagaaaaagcgagcatcagccgtatcggctttgtaacacaaattagctatcgtgaagtccgctcagctcttccctttctaccctggctgctttttgcagggattggtccgtggtctccagtctcttgggttctcaccctgtgtgaaaatcttcctgtttttccctaccccccaagtcacctcttacacagcctctgcttccaagcgcagcccccacaggagtttgtaggatttctgtgctagcggggagtgtgttctcacctcatagagccaggtagaaactacgcagatgggtgctgttctccaggaagaaagcagggcctttggggctctcagtgtccccgttgggttgtaga

SEQ ID NO: 586 - DNA, 1087 bp, synthetic construct
  source 1..1087: mol_type = other DNA
cacgcctgcctgggctgctccaaggtggtggctaggggtggcacaagttacacattttcaatttggataggttgtgattcttgtcttccccagtcagatacctacagccgctgagagccggtattccaacgccatgagacgccttctgtcgtgagcagttgacaagaaagacccagcacttactgcaaccggaaggagcggttcctccctcgctcgcgcagccgctcttccccgccactccctcggtgcccgccagcacattcccagcaagccctgagtatatttgcatatcaactcactacatttttttcttctaactaaaaaatcgaaaggacaaattccagattctccttgtgaagtcttcctttcagttcagaagaaatggaattcgctcttcaacttcaggaagttgaaataaagagttgcttggattttgtgttcacctttaccaaaaaatggatttggtaacactgccaccctgctttggtgacagagaaagcaatgatagggacttagggtgatagaagtgcaaagcatgactgtcaaatttttggagcaggttttctgacttcggtcggaaaacccctactttctggagtttcaaaaacagaccgtacgccaagggtcatgtcttttttcgtattggtttgtgtcttagttgttaatcctacagtggaggcctggggaataagaagtaacatgtggcctgcacgccataggagaaaaagcgagcatcagccgtatcggctttgtaacacaaattagctatcgtgaagtccgctcagctcttccatttctaccctggctgctttttgcagggattggtccgtggtctccagtctcttgggttctcaccctgtgtgaaaatcttcgtgtttttccctaccccccaagtcacctcttacacagcctctgcttccaagcgcagcccccacaggagtttgtaggatttctgtgctagcggggagtgtgttctcacctcatagagccaggtagaaattatgcagatgggcgctgttctctgggaagaaagcagggcctttggggctctcagtgtccccgttgggttgtagacataacactctta

SEQ ID NO: 587 - DNA, 891 bp, synthetic construct
  source 1..891: mol_type = other DNA
cacgcctgcctgggctgctccaaggtggtggctaggggtggcacaagttacacattttcaatttggataggttgtgattcttgtcttccccagtcagatacctacagccgctgagagccggtattccaacgccatgagacgccttctgtcgtgagcagttgacaagaaagacccagcacttactgcaaccggaaggagcggttcctccctcgctcgcgcagccgctcttccccgccactccctcggtgcccgccagcacattcccagcaagccctgagtatatttgcatatcaactcactacatttttttcttctaactaaaaaatcgaaaggacaaattccagattctccttgtgaagtcttcctttcagttcagaagaaatggaattcgctcttcaacttcaggaagttgaaataaagagttgcttggattttgtgttcacctttaccaaaaaatggatttggtaacactgccaccctgctttggtgacagagaaagcaatgatagggacttagggtgatagaagtgcaaagcatgactgtcaaatttttggagcaggttttctgacttcggtcggaaaacccctcctccggggatacaacgtgtttcctaaaagtagagggaggtaagagacggtagcacctgcggggcggcttgcacgccgagtgcctgtgacgcgccggcttaacttaactgcttccctgaagtaccttgaggttcctgatgtgcgggcggtagacggtaggcttatgcggcacgctgtcgtttccaccgtggctactgcgctttgggaaggccacgacctcctcctttggggaggtccttaggatctcagcttggcagtcgagtgggtggcgaccttttaaaggaatgggacccacccggagttc

SEQ ID NO: 588 - DNA, 1079 bp, synthetic construct
  source 1..1079: mol_type = other DNA
cacgcctgcctgggctgctccaaggtggtggctaggggtggcacaagttacacattttcaatttggataggttgtgattcttgtcttccccagtcagatacctacagccgctgagagccggtattccaacgccatgagacgccttctgtcgtgagcagttgacaagaaagacccagcacttactgcaaccggaaggagcggttcctccctcgctcgcgcagccgctcttccccgccactccctcggtgcccgccagcacattcccagcaagccctgagtatatttgcatatcaactcactacatttttttcttctaactaaaaaatcgaaaggacaaattccagattctccttgtgaagtcttcctttcagttcagaagaaatggaattcgctcttcaacttcaggaagttgaaataaagagttgcttggattttgtgttcacctttaccaaaaaatggatttggtaacactgccaccctgctttggtgacagagaaagcaatgatagggacttagggtgatagaagtgcaaagcatgactgtcaaatttttggagcaggttttctgacttcggtcggaaaacccctttcccttcttgtaatacaaaataataacaaccacagaggacatcgcaagtaaaatgtgtataacaaccccatctaaagaaccctatcatctttctactatctgtctacctaaatatgtatagtataaataaccctatatagcactctaagcaacttaagttaggtaacttagaaaactcttttttttttttgagactgagtctcactctgtcgcacccaggctggagtgcagtggcgtgatctcggctcactgcaacctccaccttctgggttcaagtgattctcccatctcagtctcccaagtagctgggattacaggcacgccaccatgccctgctacatttttttttttttagtagagatgaggtttcaccacattggccaggctgttctcgaactcctgacctcaggtgatccgcccaccttggcctcatgaagtgctgggattacaggtgtgagccactgtacccagccagaaaactcttaaaaaac

SEQ ID NO: 589 - DNA, 969 bp, synthetic construct
  source 1..969: mol_type = other DNA
cacgcctgcctgggctgctccaaggtggtggctaggggtggcacaagttacacattttcaatttggataggttgtgattcttgtcttccccagtcagatacctacagccgctgagagccggtattccaacgccatgagacgccttctgtcgtgagcagttgacaagaaagacccagcacttactgcaaccggaaggagcggttcctccctcgctcgcgcagccgctcttccccgccactccctcggtgcccgccagcacattcccagcaagccctgagtatatttgcatatcaactcactacatttttttcttctaactaaaaaatcgaaaggacaaattccagattctccttgtgaagtcttcctttcagttcagaagaaatggaattcgctcttcaacttcaggaagttgaaataaagagttgcttggattttgtgttcacctttaccaaaaaatggatttggtaacactgccaccctgctttggtgacagagaaagcaatgatagggacttagggtgatagaagtgcaaagcatgactgtcaaatttttggagcaggttttctgacttcggtcggaaaacccctctgaattttcttgcagttgaacaacagaggctttttttgtgtgtgtgggggtgcttggttttgggaggttgaagagtacttgttcgcaaactctctaaatgagagatggggaagtgtcttaccagctgattcgcgagagcacctgcaagtttacctgttttagtgatttgcgtttatgaaagttggagttgctgattttgtgatctctacttttaaggtaaaagcagggcggtgttgacttttcttgccagttggctgtcctgttttctttctcgcactgttttctttttgagacgaagtctgtcgctcaggctggagtgcactggcgtgatctcggctcgctgcaaactttgccgaacccctgtttagcgatttccgtttg

SEQ ID NO: 590 - DNA, 1087 bp, synthetic construct
  source 1..1087: mol_type = other DNA
cacgcctgcctgggctgctccaaggtggtggctaggggtggcacaagttacacattttcaatttggataggttgtgattcttgtcttccccagtcagatacctacagccgctgagagccggtattccaacgccatgagacgccttctgtcgtgagcagttgacaagaaagacccagcacttactgcaaccggaaggagcggttcctccctcgctcgcgcagccgctcttccccgccactccctcggtgcccgccagcacattcccagcaagccctgagtatatttgcatatcaactcactacatttttttcttctaactaaaaaatcgaaaggacaaattccagattctccttgtgaagtcttcctttcagttcagaagaaatggaattcgctcttcaacttcaggaagttgaaataaagagttgcttggattttgtgttcacctttaccaaaaaatggatttggtaacactgccaccctgctttggtgacagagaaagcaatgatagggacttagggtgatagaagtgcaaagcatgactgtcaaatttttggagcaggttttctgacttcggtcggaaaacccctatatgtggtaatccaacaatagaaattatttttaagtttgtgtgttcctttttctgttcaatggtgcttttgatattgttgtaaagcagtgactagcagattctgtgtggtaaaagcactgaaccctgtttagttcttttctccctaccttattggtaattatttctgtgtatatatgttccaaagaaatgcggcttgtatattcatgcttttcaactttttgtgatagacagttgatacacaagtagtacctcctccgggatcttcttagtcaagactgtttggtagatgcatgttttttgttacttgtaatgtacagtattcagttcattttctttttgcagcactgtccggttgaaacacaacgcgaggatcgggcgtggtggctcacgcctgtaatcccagcactttgggaggccgaggcaggacaatcaagaccaatcctggtcatcaaggcaggagaatcaagaccatcgaggtcaggagatcaagaccatcct

SEQ ID NO: 591 - DNA, 1085 bp, synthetic construct
  source 1..1085: mol_type = other DNA
cacgcctgcctgggctgctccaaggtggtggctaggggtggcacaagttacacattttcaatttggataggttgtgattcttgtcttccccagtcagatacctacagccgctgagagccggtattccaacgccatgagacgccttctgtcgtgagcagttgacaagaaagacccagcacttactgcaaccggaaggagcggttcctccctcgctcgcgcagccgctcttccccgccactccctcggtgcccgccagcacattcccagcaagccctgagtatatttgcatatcaactcactacatttttttcttctaactaaaaaatcgaaaggacaaattccagattctccttgtgaagtcttcctttcagttcagaagaaatggaattcgctcttcaacttcaggaagttgaaataaagagttgcttggattttgtgttcacctttaccaaaaaatggatttggtaacactgccaccctgctttggtgacagagaaagcaatgatagggacttagggtgatagaagtgcaaagcatgactgtcaaatttttggagcaggttttctgacttcggtcggaaaacccctacatcaggttgtttttctgtttttacatcaggttgtttttctgtttggttttttttttacaccacgtttatacgccggtgcacggtttaccactgaaaacacctttcatctacaggtgatatcttttaacacaaataaaatgtagtagtcctaggagacggaatagaaggaggtggggcctaggcagattcatctctgcggtgcattttgcctctggccctcgggccctagtttgcgatctttcccatcttgcctctgcttccctctgcacaatcctgagtattgcagtaccttacacttaaggaaatttcgtcttgccaaagttgatccatttcagctccgaaacataacaggaactagtgcaacgataaacgtatgaggaacttgcaataagagtgacagaatcctttgaatcaaaaaaaaaaaaagccaccacttaatgagtatctaccatatgtcaagggcttcaccaatatttcattgaaatattccagacca

SEQ ID NO: 592 - DNA, 1087 bp, synthetic construct
  source 1..1087: mol_type = other DNA
cacgcctgcctgggctgctccaaggtggtggctaggggtggcacaagttacacattttcaatttggataggttgtgattcttgtcttccccagtcagatacctacagccgctgagagccggtattccaacgccatgagacgccttctgtcgtgagcagttgacaagaaagacccagcacttactgcaaccggaaggagcggttcctccctcgctcgcgcagccgctcttccccgccactccctcggtgcccgccagcacattcccagcaagccctgagtatatttgcatatcaactcactacatttttttcttctaactaaaaaatcgaaaggacaaattccagattctccttgtgaagtcttcctttcagttcagaagaaatggaattcgctcttcaacttcaggaagttgaaataaagagttgcttggattttgtgttcacctttaccaaaaaatggatttggtaacactgccaccctgctttggtgacagagaaagcaatgatagggacttagggtgatagaagtgcaaagcatgactgtcaaatttttggagcaggttttctgacttcggtcggaaaacccctcttatgatgtttgttgccaatgatagattgttttcactgtgcaaaaattatgggtagttttggtggtcttgatgcagttgtaagcttggggtatgaaggtttgggccacgcctgggcgcttccggctgcgccggatgctgtttcctttccgctcccaggggcgttgggaacggttgtaggacgtggctctttattcgtgagttttccatttacctccgctgaacctagagcttcagacgccctatggcgtccgcctcgacccaaccggcggccttgagcgctgagcaagcaaagggtgagaatcgtcctagtcaaggcataggctgctggcctggggtagtcaaggcatgggctgctggtctggggaggatgcgggcggaggatgtggggcgacaaacctggctacgtccgccgggaaaatggggtaggggacgccgggtaccgtccttctaagtggggcgcttgcccccaagacttgggatcttattgggttacctaca

SEQ ID NO: 593 - DNA, 1085 bp, synthetic construct
  source 1..1085: mol_type = other DNA
cacgcctgcctgggctgctccaaggtggtggctaggggtggcacaagttacacattttcaatttggataggttgtgattcttgtcttccccagtcagatacctacagccgctgagagccggtattccaacgccatgagacgccttctgtcgtgagcagttgacaagaaagacccagcacttactgcaaccggaaggagcggttcctccctcgctcgcgcagccgctcttccccgccactccctcggtgcccgccagcacattcccagcaagccctgagtatatttgcatatcaactcactacatttttttcttctaactaaaaaatcgaaaggacaaattccagattctccttgtgaagtcttcctttcagttcagaagaaatggaattcgctcttcaacttcaggaagttgaaataaagagttgcttggattttgtgttcacctttaccaaaaaatggatttggtaacactgccaccctgctttggtgacagagaaagcaatgatagggacttagggtgatagaagtgcaaagcatgactgtcaaatttttggagcaggttttctgacttcggtcggaaaaccccttctttactgttatatgttaggcgaaatattacgcgtttggagtaagtggtgctttttgtaactgaaaagagattctgtgtgtgtttttttttttttagaggctgcatagttatttgtatgaaccgcaggtgacctaattagcaaggtaattcagacctgtatcctagcacttaagaagtggaagtgggataaccctgcgtgttctcgtgtgggaggctagcttaagcaacaaagcaggaaggccccaccaacaaaagaatttaaaaattatacgtgcgtggtggcgcgcgtatgaggaaattatttggcaactgtgttacagtatagcagcaaatggaatagacctagtccctgactttaggagacctgcctcagccccccgaatggctgggactacaggcgtgcgcctccgcgcccagctaatttttgcatttttggtagagacgggttcaccatgttggccaggatggtctccatctcttcatctggtgatccgcc

SEQ ID NO: 594 - DNA, 1087 bp, synthetic construct
  source 1..1087: mol_type = other DNA
cacgcctgcctgggctgctccaaggtggtggctaggggtggcacaagttacacattttcaatttggataggttgtgattcttgtcttccccagtcagatacctacagccgctgagagccggtattccaacgccatgagacgccttctgtcgtgagcagttgacaagaaagacccagcacttactgcaaccggaaggagcggttcctccctcgctcgcgcagccgctcttccccgccactccctcggtgcccgccagcacattcccagcaagccctgagtatatttgcatatcaactcactacatttttttcttctaactaaaaaatcgaaaggacaaattccagattctccttgtgaagtcttcctttcagttcagaagaaatggaattcgctcttcaacttcaggaagttgaaataaagagttgcttggattttgtgttcacctttaccaaaaaatggatttggtaacactgccaccctgctttggtgacagagaaagcaatgatagggacttagggtgatagaagtgcaaagcatgactgtcaaatttttggagcaggttttctgacttcggtcggaaaacccctaccttattcacgcctaaaaagtagactgactgtggggtggtcgtgttttttgtttcttgttggtaggtggtgaatgcgtttttttcgttgttttctccgttactcaggctgccagttgcttggcagtcttgtcgctggctgtggacgctctgcacttcatcaccgtccccagctgcgctttgagccggtctaaggttgcccacagtattgacgttgggacccacgaaactggcaatttccatgtgtgcggccttacccagttctcccaaacttctgcgtataaccgcttctctgtgcttcagaaagataagtccggccccggcctcacacagcagctcagttcgtgacagcgtttaatatgtaaaatggagcaaataatttatagggcgttgggagagttaaagagactaattcatttacgtgttaaatacagggaatggcttttgcattgatataaccccagcctccagcatgcgccagacctgacgtaggtgttcggc

SEQ ID NO: 595 - DNA, 1087 bp, synthetic construct
  source 1..1087: mol_type = other DNA
cacgcctgcctgggctgctccaaggtggtggctaggggtggcacaagttacacattttcaatttggataggttgtgattcttgtcttccccagtcagatacctacagccgctgagagccggtattccaacgccatgagacgccttctgtcgtgagcagttgacaagaaagacccagcacttactgcaaccggaaggagcggttcctccctcgctcgcgcagccgctcttccccgccactccctcggtgcccgccagcacattcccagcaagccctgagtatatttgcatatcaactcactacatttttttcttctaactaaaaaatcgaaaggacaaattccagattctccttgtgaagtcttcctttcagttcagaagaaatggaattcgctcttcaacttcaggaagttgaaataaagagttgcttggattttgtgttcacctttaccaaaaaatggatttggtaacactgccaccctgctttggtgacagagaaagcaatgatagggacttagggtgatagaagtgcaaagcatgactgtcaaatttttggagcaggttttctgacttcggtcggaaaaccccttttgacccattacccatctaagttagatgcttttttaaatgttttttaatttttaaatttttaatttttttcattatttattttttatttttgagacggatctcggctcactgtaacctccacctcccgggttcaagcgattctcctgactcagcctcccgagtagctgggattacaggcgcgcgccaccatgcccggctaatttttctatttttagtaaagacggggtttcgccatgttgaccagggtggtcttgaactcctgacgtcaggtgatcctcctgcctcgtgctgggattgcaggcgtgagccaccgctcccggcccttagatgctttttaatcagcaagtacgcaatgctttcctgacaggaatgtcaagtccgtcaggaaatccacataagggtgttaagcaggcaaagtaccacatacagattaaaatcaaaagcactgtcaacgcttatttaatttatacagtagaccctaacttttctaattttgtg

SEQ ID NO: 596 - DNA, 1087 bp, synthetic construct
  source 1..1087: mol_type = other DNA
cacgcctgcctgggctgctccaaggtggtggctaggggtggcacaagttacacattttcaatttggataggttgtgattcttgtcttccccagtcagatacctacagccgctgagagccggtattccaacgccatgagacgccttctgtcgtgagcagttgacaagaaagacccagcacttactgcaaccggaaggagcggttcctccctcgctcgcgcagccgctcttccccgccactccctcggtgcccgccagcacattcccagcaagccctgagtatatttgcatatcaactcactacatttttttcttctaactaaaaaatcgaaaggacaaattccagattctccttgtgaagtcttcctttcagttcagaagaaatggaattcgctcttcaacttcaggaagttgaaataaagagttgcttggattttgtgttcacctttaccaaaaaatggatttggtaacactgccaccctgctttggtgacagagaaagcaatgatagggacttagggtgatagaagtgcaaagcatgactgtcaaatttttggagcaggttttctgacttcggtcggaaaacccctgtttacttggttttaaaaatagcttgcactagcgataccgcgaatatggttattaggtttgttaggcacagtcgtgtcttactatagaaaaataacgtagtgttcattttgctgcctgtatgtgttaatttgtccttattgcgccattgttcttgttaagtcttctgtaaggagttgcgggtttcaaactgtcagtctgagagcataagctcacttttcagtcagttgaattgaatgttacattcgattggttctggatattgatattacccaaggcttgtcctgtttgtaagtcttttcctacacctgacaatatgattatgtttacaatgtccctagaactctgggtgtatcgttcccactgaataaaatttgatctctaagttgacctataaatttaagtaccaaaaaactggtttgtaagattttggaaggcagaggcagggaagagaccaacgtggtctacatataaagtaccaggtacatataaagtaccaggt

SEQ ID NO: 597 - DNA, 1083 bp, synthetic construct
  source 1..1083: mol_type = other DNA
cacgcctgcctgggctgctccaaggtggtggctaggggtggcacaagttacacattttcaatttggataggttgtgattcttgtcttccccagtcagatacctacagccgctgagagccggtattccaacgccatgagacgccttctgtcgtgagcagttgacaagaaagacccagcacttactgcaaccggaaggagcggttcctccctcgctcgcgcagccgctcttccccgccactccctcggtgcccgccagcacattcccagcaagccctgagtatatttgcatatcaactcactacatttttttcttctaactaaaaaatcgaaaggacaaattccagattctccttgtgaagtcttcctttcagttcagaagaaatggaattcgctcttcaacttcaggaagttgaaataaagagttgcttggattttgtgttcacctttaccaaaaaatggatttggtaacactgccaccctgctttggtgacagagaaagcaatgatagggacttagggtgatagaagtgcaaagcatgactgtcaaatttttggagcaggttttctgacttcggtcggaaaacccctatttttgtggtgctaaaagttagattgcattccgcccttctcacgtctctttacgtgttgtttgcgaggcgtggcctcggaggtaaatggtctccttttacctcagataagcttacctttgctctgtgagtaagaatgtagctacacttccaaatttagctattgtcctttgcggtccaaatgaaaatattaccttccgatctaacaatgttaaactagtcccaggcccttctatcgattgccagaatagactagactactacacagacacaccctctcaaatcaggccagctcctgcaacctgcacctacagtttgtcccctgggacaaatgaaaggacaggccctctttcccccccccccccaaatcagagcacacacagatcttggggtctggggcagaaatttcgttcatggaaaaaacaaacaaacaaacaaacacgatcaaaggaagctcgttccctttggcctcagggtttcttagacgccgtgttccc

SEQ ID NO: 598 - DNA, 1084 bp, synthetic construct
  source 1..1084: mol_type = other DNA
cacgcctgcctgggctgctccaaggtggtggctaggggtggcacaagttacacattttcaatttggataggttgtgattcttgtcttccccagtcagatacctacagccgctgagagccggtattccaacgccatgagacgccttctgtcgtgagcagttgacaagaaagacccagcacttactgcaaccggaaggagcggttcctccctcgctcgcgcagccgctcttccccgccactccctcggtgcccgccagcacattcccagcaagccctgagtatatttgcatatcaactcactacatttttttcttctaactaaaaaatcgaaaggacaaattccagattctccttgtgaagtcttcctttcagttcagaagaaatggaattcgctcttcaacttcaggaagttgaaataaagagttgcttggattttgtgttcacctttaccaaaaaatggatttggtaacactgccaccctgctttggtgacagagaaagcaatgatagggacttagggtgatagaagtgcaaagcatgactgtcaaatttttggagcaggttttctgacttcggtcggaaaacccctataactggtaaccaaaagcagattactttcccccttgtggtcttcgcgtttgcggacgggagagaactttcggccattttccttttagaaatttaacttcttgaaggccaccaggtgacccttacttccctctcacctttccttctacctgtactttctctattaaaaagcctgcagaagtacccttgacaaattgccaaaaatgacacctaaaaaaaaaaaaaggaaaaacgacaccttaggtaattataggttgtaagaaaaagatttgacctcttggagtttttatttcttaataccaaaggacacccaaggaacgtatctctcaaaattgggtttcaaacctcagccgtttccttcttagttccagtgcttaacacgcaacagacctgcacaccactacactgcatacgagttttaaagttaataaatcagtcacccctccatagtcttctacctacttgaagacagaaacggctgctaggaagcaattcttc

SEQ ID NO: 599 - DNA, 1087 bp, synthetic construct
  source 1..1087: mol_type = other DNA
cacgcctgcctgggctgctccaaggtggtggctaggggtggcacaagttacacattttcaatttggataggttgtgattcttgtcttccccagtcagatacctacagccgctgagagccggtattccaacgccatgagacgccttctgtcgtgagcagttgacaagaaagacccagcacttactgcaaccggaaggagcggttcctccctcgctcgcgcagccgctcttccccgccactccctcggtgcccgccagcacattcccagcaagccctgagtatatttgcatatcaactcactacatttttttcttctaactaaaaaatcgaaaggacaaattccagattctccttgtgaagtcttcctttcagttcagaagaaatggaattcgctcttcaacttcaggaagttgaaataaagagttgcttggattttgtgttcacctttaccaaaaaatggatttggtaacactgccaccctgctttggtgacagagaaagcaatgatagggacttagggtgatagaagtgcaaagcatgactgtcaaatttttggagcaggttttctgacttcggtcggaaaacccctctggggaataagagtggtttaaagaaagaacaatttgagagatctgcttagatctaataaaacccaagtatagtttctttagacgtcttatatctcacgtaggacctcttatttcagactcactgcaagaacaagctaaagaactatatacagtcaggaacaaggtgagccatcgcggttctcagtcccatgatcttaagagtttttcctcttcccctcttccctggctgtcctggagctcactctgtagaccaggctggtctcaaactcagaaatccacttacctctgcctcccaagggctgggattaaaggcatgcaccaccattgcccggcagggtatgtggactatgctgtccttcaactcagagatcgtggtactttaaatctcattttccgaaagaaaagaaaagaaaggaaggggggaaataaagccagtatattttgcacccacaatctgaagttctacaaatattgttagaaaatgcaaaggacccaagtc

SEQ ID NO: 600 - DNA, 1087 bp, synthetic construct
  source 1..1087: mol_type = other DNA
cacgcctgcctgggctgctccaaggtggtggctaggggtggcacaagttacacattttcaatttggataggttgtgattcttgtcttccccagtcagatacctacagccgctgagagccggtattccaacgccatgagacgccttctgtcgtgagcagttgacaagaaagacccagcacttactgcaaccggaaggagcggttcctccctcgctcgcgcagccgctcttccccgccactccctcggtgcccgccagcacattcccagcaagccctgagtatatttgcatatcaactcactacatttttttcttctaactaaaaaatcgaaaggacaaattccagattctccttgtgaagtcttcctttcagttcagaagaaatggaattcgctcttcaacttcaggaagttgaaataaagagttgcttggattttgtgttcacctttaccaaaaaatggatttggtaacactgccaccctgctttggtgacagagaaagcaatgatagggacttagggtgatagaagtgcaaagcatgactgtcaaatttttggagcaggttttctgacttcggtcggaaaacccctctcggtttatcttaaagggttttaaatatagaaagcttccttagtcttatgggtgagagtgctgtttaagccttacctaggtatgtctttgaacatttattacagattgttatttgtgactatgaccactcaggtgttctgttcttgtgaatttagacacactcagaaaggctacacactcaaagaccacaccaaagtgaagtactatctgggccgtgaaactggtcacatatcagttattttgcagtaaaacaaggaagtcaatcatactgcttcagtgggtcagggagtcaagaatgcacagtacaagagctggtgagattcctcagcaggtaagagcactgaatgctcttccaaagattctgagttcaaatcccagcaaccacgtggtggatttgaacaaaggatgaaaacaaccatccataaccagatctgatgccctcttctggagtgtcaaaagacagctatggtgtacttacataaataaataagtaaaaaca

SEQ ID NO: 601 - DNA, 1087 bp, synthetic construct
  source 1..1087: mol_type = other DNA
cacgcctgcctgggctgctccaaggtggtggctaggggtggcacaagttacacattttcaatttggataggttgtgattcttgtcttccccagtcagatacctacagccgctgagagccggtattccaacgccatgagacgccttctgtcgtgagcagttgacaagaaagacccagcacttactgcaaccggaaggagcggttcctccctcgctcgcgcagccgctcttccccgccactccctcggtgcccgccagcacattcccagcaagccctgagtatatttgcatatcaactcactacatttttttcttctaactaaaaaatcgaaaggacaaattccagattctccttgtgaagtcttcctttcagttcagaagaaatggaattcgctcttcaacttcaggaagttgaaataaagagttgcttggattttgtgttcacctttaccaaaaaatggatttggtaacactgccaccctgctttggtgacagagaaagcaatgatagggacttagggtgatagaagtgcaaagcatgactgtcaaatttttggagcaggttttctgacttcggtcggaaaacccctccacattttgtgtttaaaaatagaaatatttaagtgagatcagtttaaatctgctttatctagggtgtctaactgcttgcatctttttaacttttccttatttgtgagaaggtctgtaaaacttattatatgttagtacactgtagctgtcttcagacactccagaagagggattcagatcaccttacagatggttttgagccaccatgtggttgctgggatttgaactcaggacctttagaaaagtagttgggtgctcttacccgctgagccatctcaccagccctttttttttcttttttccagttcgggtttctctgtgtgtagccctggctgtcctggaactcattctgtagaccgggctggcctcgaactcagaaatctgcctgcctctgcctcccaagtgctgggattaaaggaatgtgccttcattgcccggctctagggctttttgttgttgtttgtttgtttgtttgtttgtttgcttttgtggatggcct

SEQ ID NO: 602 - DNA, 1087 bp, synthetic construct
  source 1..1087: mol_type = other DNA
cacgcctgcctgggctgctccaaggtggtggctaggggtggcacaagttacacattttcaatttggataggttgtgattcttgtcttccccagtcagatacctacagccgctgagagccggtattccaacgccatgagacgccttctgtcgtgagcagttgacaagaaagacccagcacttactgcaaccggaaggagcggttcctccctcgctcgcgcagccgctcttccccgccactccctcggtgcccgccagcacattcccagcaagccctgagtatatttgcatatcaactcactacatttttttcttctaactaaaaaatcgaaaggacaaattccagattctccttgtgaagtcttcctttcagttcagaagaaatggaattcgctcttcaacttcaggaagttgaaataaagagttgcttggattttgtgttcacctttaccaaaaaatggatttggtaacactgccaccctgctttggtgacagagaaagcaatgatagggacttagggtgatagaagtgcaaagcatgactgtcaaatttttggagcaggttttctgacttcggtcggaaaacccctaaaaccagtaagggagaaaggtcaagtaacatataaaggaaggcctatcagaattacaccagacttttcaccagagactatgaaagccagaagagcctggacagatgttatacagacactaagagaacacaaatgccagcccaggctactatacctggccaaactctcaattaccatagatggagaaaccaaagtattccacgacaaaaacaaattcacacaatatctttccacgaatccagcccttcaaaggataatgacagaaaagaagcaatacaaggacggaaatcacgccctagaacaaccaagaaactaatcattcaacaaaccaaaaagaagacagccacaagaacagaatgccaactctaacaacaaaaataaaaggaagcaacaattacttttccttaatatctcttaatatcaatggactcaattccccaataaaaagacatagactaacagactggctacacaaacaggacccaacattctgctgctta

SEQ ID NO: 603 - DNA, 1087 bp, synthetic construct
  source 1..1087: mol_type = other DNA
cacgcctgcctgggctgctccaaggtggtggctaggggtggcacaagttacacattttcaatttggataggttgtgattcttgtcttccccagtcagatacctacagccgctgagagccggtattccaacgccatgagacgccttctgtcgtgagcagttgacaagaaagacccagcacttactgcaaccggaaggagcggttcctccctcgctcgcgcagccgctcttccccgccactccctcggtgcccgccagcacattcccagcaagccctgagtatatttgcatatcaactcactacatttttttcttctaactaaaaaatcgaaaggacaaattccagattctccttgtgaagtcttcctttcagttcagaagaaatggaattcgctcttcaacttcaggaagttgaaataaagagttgcttggattttgtgttcacctttaccaaaaaatggatttggtaacactgccaccctgctttggtgacagagaaagcaatgatagggacttagggtgatagaagtgcaaagcatgactgtcaaatttttggagcaggttttctgacttcggtcggaaaacccctcccaatttcactggtctacaatgaaagcaaaacagttctcttccccgctccccggtgtgtgagaggggctttgatccttctctggtttcctaggaaacgcgtatgtgctagagccacgctctgagacttccgcctcgtgcggtcccgcttcctttctgcctcctctggcctgcatccgtgggggaggtggctggctgcagggttctccggatctcttctgtgttcccactactcaagcaccgagtggcgttctatggcgtccgcctcggctcagcccgcggccctgagcgcggagcaggccaagggtgaggaaagagcctagtctgggtgtgggccgtcttctggggggagggcgcgatactattctttgcctctccaagtggggcccttgcccattagggcgaagggttgggaggacaagcttatcgggttgcttgcaggcctcggcccactaattccctgcctcttccctcctctgggctcgcccgccgtcctccgcg

SEQ ID NO: 604 - DNA, 1087 bp, synthetic construct
  source 1..1087: mol_type = other DNA
cacgcctgcctgggctgctccaaggtggtggctaggggtggcacaagttacacattttcaatttggataggttgtgattcttgtcttccccagtcagatacctacagccgctgagagccggtattccaacgccatgagacgccttctgtcgtgagcagttgacaagaaagacccagcacttactgcaaccggaaggagcggttcctccctcgctcgcgcagccgctcttccccgccactccctcggtgcccgccagcacattcccagcaagccctgagtatatttgcatatcaactcactacatttttttcttctaactaaaaaatcgaaaggacaaattccagattctccttgtgaagtcttcctttcagttcagaagaaatggaattcgctcttcaacttcaggaagttgaaataaagagttgcttggattttgtgttcacctttaccaaaaaatggatttggtaacactgccaccctgctttggtgacagagaaagcaatgatagggacttagggtgatagaagtgcaaagcatgactgtcaaatttttggagcaggttttctgacttcggtcggaaaacccctgaatttgttaaattacaggaggaagcttttttagttcattttacaaatactttcttgttaggtagataataccttctaaggttattatctggatcttctaagtctttttatcgctagcaagtctaagtttctggactttggaattagaagttaatgtcgtaggcgggcatggtggtccacgcctttaatcccagagtttgggaggcagacgcaggtggttttctgagttcgaggccatcctgctcttcaatgttagttccaggacagccagggttatacaaagaaaccctgtctcgagaaacaaaacaaacaaaaaaagagtagctgagtgctctgagttgtctctccagccccttagctatttattttcatttaaattatttttgttttattcgcttgtgtgcctgagtttgaatttcccgggattaacagttgaagactagggctggtgagatggctcagcggttaagattgccgactgctcttccaaaggtcctgag

SEQ ID NO: 605 - DNA, 1087 bp, synthetic construct
  source 1..1087: mol_type = other DNA
cacgcctgcctgggctgctccaaggtggtggctaggggtggcacaagttacacattttcaatttggataggttgtgattcttgtcttccccagtcagatacctacagccgctgagagccggtattccaacgccatgagacgccttctgtcgtgagcagttgacaagaaagacccagcacttactgcaaccggaaggagcggttcctccctcgctcgcgcagccgctcttccccgccactccctcggtgcccgccagcacattcccagcaagccctgagtatatttgcatatcaactcactacatttttttcttctaactaaaaaatcgaaaggacaaattccagattctccttgtgaagtcttcctttcagttcagaagaaatggaattcgctcttcaacttcaggaagttgaaataaagagttgcttggattttgtgttcacctttaccaaaaaatggatttggtaacactgccaccctgctttggtgacagagaaagcaatgatagggacttagggtgatagaagtgcaaagcatgactgtcaaatttttggagcaggttttctgacttcggtcggaaaacccctaccccctaattctacaagaatagaaagcttagcagctcctctgaatggttgctctcaggtgctagtggttgcaagtcgtatgttgatgcctgcctttgccctacctggtgtgtgagcgtgagcgcgccccacctctccagcctctctcttactgtttttcagacaagatgggactgttgttctcctactgctatgtacctcaatttcaattgatcatgcctggacataactgcccatgttgtaaggtcgtctacgttgtaaggtcgtgctcagtttctgatgcctagactagtcacctttccgtttgcctcctgactgtgtaaatgaggcaaatgaaggtggtctcttaactgacatgttagtgtttgacctatgggatagtttctcattgttgagacagaatttctagaagctggtccgctgagcggctaagagcacttgctgatattgcaaaggatctacctgggtttggttctcagcactcacatggaagttcacat

SEQ ID NO: 606 - DNA, 654 bp, synthetic construct
  source 1..654: mol_type = other DNA
cacgcctgcctgggctgctccaaggtggtggctaggggtggcacaagttacacattttcaatttggataggttgtgattcttgtcttccccagtcagatacctacagccgctgagagccggtattccaacgccatgagacgccttctgtcgtgagcagttgacaagaaagacccagcacttactgcaaccggaaggagcggttcctccctcgctcgcgcagccgctcttccccgccactccctcggtgcccgccagcacattcccagcaagccctgagtatatttgcatatcaactcactacatttttttcttctaactaaaaaatcgaaaggacaaattccagattctccttgtgaagtcttcctttcagttcagaagaaatggaattcgctcttcaacttcaggaagttgaaataaagagttgcttggattttgtgttcacctttaccaaaaaatggatttggtaacactgccaccctgctttggtgacagagaaagcaatgatagggacttagggtgatagaagtgcaaagcatgactgtcaaatttttggagcaggttttctgacttcggtcggaaaaccccttgtagttcctgcaatttaattttcgtttaaaactttattttattctttaacttaaaaaaaatatata

SEQ ID NO: 607 - DNA, 1087 bp, synthetic construct
  source 1..1087: mol_type = other DNA
tcgagctccactaggccgaggaccctaaaccccgaagaaaggaaaggcctctcaccgtcctttcgccgccgccccgcgcttcctgatgagttcgtccagggagatgtccgccatcttgctccgccgagcaagccgaaagcagtcgagaccccgcgagcccgccccttcggccgctagggagcgacgaactacttccggcgtccgcggaccaactctcgcgacagccagctcaaagcaggcaagaaccggaaggggcggggacgttccccgtgagccttcgcggtgctggctgctcatctgcatacggaagttcggcacattatgaattatttattttcctcgagggaaaaaattaaatgaaaagcaacaaaatacattattaacaagtgagacaaacttcaatggaactggatcatgacctcaacagtcaactacgatagtcatcatacgcctaatgagaatagaattcattacctaggaaataaactaaaaacgtccttaatgatagggacttagggtgatagaagtgcaaagcatgactgtcaaatttttggagcaggttttctgacttcggtcggaaaacccctactttctggagtttcaaaaacagactgtacgccaagggtcatatctttttttgtattggtttgtgtcttggttggtgtcttaggtgttaatcctacagtggagggtttatgggaataggaagtaacatgtcgcctgcatgtcataggagaaaaagcgagcatcagccgtatcggctttgtaacacaaattagctatcgtgaagtccgctcagctcttccctttctaccctggctgctttttgcagggattggtccgtggtctccagtctcttgggttctcaccctgtgtgaaaatcttcgtgtttttccctaccccccagtcacctcttacacagcctctgcttccaagcgcagcccccacaggagtttgtaggatttctgtgctagcggggaatgtgttctcacctcatagagccaggtagaaattatgcagatgggcagttctctgggaagaaagcagggcctttggggctctcagtgtccccgttgggttgtagaca

SEQ ID NO: 608 - DNA, 1087 bp, synthetic construct
  source 1..1087: mol_type = other DNA
tcgagctccactaggccgaggaccctaaaccccgaagaaaggaaaggcctctcaccgtcctttcgccgccgccccgcgcttcctgatgagttcgtccagggagatgtccgccatcttgctccgccgagcaagccgaaagcagtcgagaccccgcgagcccgccccttcggccgctagggagcgacgaactacttccggcgtccgcggaccaactctcgcgacagccagctcaaagcaggcaagaaccggaaggggcggggacgttccccgtgagccttcgcggtgctggctgctcatctgcatacggaagttcggcacattatgaattatttattttcctcgagggaaaaaattaaatgaaaagcaacaaaatacattattaacaagtgagacaaacttcaatggaactggatcatgacctcaacagtcaactacgatagtcatcatacgcctaatgagaatagaattcattacctaggaaataaactaaaaacgtccttaatgatagggacttagggtgatagaagtgcaaagcatgactgtcaaatttttggagcaggttttctgacttcggtcggaaaacccctactttctggagtttctaaaagtagactgtacgctaagggtcatatctttttttgttttggtttgtgtcttggttggcgtcttaaatgttaatcctacagtggagggctggcgaataggaagtaacatgtcgcctgcacgccataggagaaaaagcgagcatcagccgtatcggctttgtaacacaaattagctatcgtgaagtccgctcagctcttccctttctaccctggctgctttttgcagggattggtccgtggtctccagtctcttgggttctcaccctgtgtgaaaatcttcctgtttttccctaccccccaagtcacctcttacacagcctctgcttccaagcgcagcccccacaggagtttgtaggatttctgtgctagcggggagtgtgttctcacctcatagagccaggtagaaactacgcagatgggtgctgttctccaggaagaaagcagggcctttggggctctcagtgtccccgttgggttgtaga

SEQ ID NO: 609 - DNA, 1087 bp, synthetic construct
  source 1..1087: mol_type = other DNA
tcgagctccactaggccgaggaccctaaaccccgaagaaaggaaaggcctctcaccgtcctttcgccgccgccccgcgcttcctgatgagttcgtccagggagatgtccgccatcttgctccgccgagcaagccgaaagcagtcgagaccccgcgagcccgccccttcggccgctagggagcgacgaactacttccggcgtccgcggaccaactctcgcgacagccagctcaaagcaggcaagaaccggaaggggcggggacgttccccgtgagccttcgcggtgctggctgctcatctgcatacggaagttcggcacattatgaattatttattttcctcgagggaaaaaattaaatgaaaagcaacaaaatacattattaacaagtgagacaaacttcaatggaactggatcatgacctcaacagtcaactacgatagtcatcatacgcctaatgagaatagaattcattacctaggaaataaactaaaaacgtccttaatgatagggacttagggtgatagaagtgcaaagcatgactgtcaaatttttggagcaggttttctgacttcggtcggaaaacccctactttctggagtttcaaaaacagaccgtacgccaagggtcatgtcttttttcgtattggtttgtgtcttagttgttaatcctacagtggaggcctggggaataagaagtaacatgtggcctgcacgccataggagaaaaagcgagcatcagccgtatcggctttgtaacacaaattagctatcgtgaagtccgctcagctcttccatttctaccctggctgctttttgcagggattggtccgtggtctccagtctcttgggttctcaccctgtgtgaaaatcttcgtgtttttccctaccccccaagtcacctcttacacagcctctgcttccaagcgcagcccccacaggagtttgtaggatttctgtgctagcggggagtgtgttctcacctcatagagccaggtagaaattatgcagatgggcgctgttctctgggaagaaagcagggcctttggggctctcagtgtccccgttgggttgtagacataacactctta

SEQ ID NO: 610 - DNA, 891 bp, synthetic construct
  source 1..891: mol_type = other DNA
tcgagctccactaggccgaggaccctaaaccccgaagaaaggaaaggcctctcaccgtcctttcgccgccgccccgcgcttcctgatgagttcgtccagggagatgtccgccatcttgctccgccgagcaagccgaaagcagtcgagaccccgcgagcccgccccttcggccgctagggagcgacgaactacttccggcgtccgcggaccaactctcgcgacagccagctcaaagcaggcaagaaccggaaggggcggggacgttccccgtgagccttcgcggtgctggctgctcatctgcatacggaagttcggcacattatgaattatttattttcctcgagggaaaaaattaaatgaaaagcaacaaaatacattattaacaagtgagacaaacttcaatggaactggatcatgacctcaacagtcaactacgatagtcatcatacgcctaatgagaatagaattcattacctaggaaataaactaaaaacgtccttaatgatagggacttagggtgatagaagtgcaaagcatgactgtcaaatttttggagcaggttttctgacttcggtcggaaaacccctcctccggggatacaacgtgtttcctaaaagtagagggaggtaagagacggtagcacctgcggggcggcttgcacgccgagtgcctgtgacgcgccggcttaacttaactgcttccctgaagtaccttgaggttcctgatgtgcgggcggtagacggtaggcttatgcggcacgctgtcgtttccaccgtggctactgcgctttgggaaggccacgacctcctcctttggggaggtccttaggatctcagcttggcagtcgagtgggtggcgaccttttaaaggaatgggacccacccggagttc

SEQ ID NO: 611 - DNA, 1079 bp, synthetic construct
  source 1..1079: mol_type = other DNA
tcgagctccactaggccgaggaccctaaaccccgaagaaaggaaaggcctctcaccgtcctttcgccgccgccccgcgcttcctgatgagttcgtccagggagatgtccgccatcttgctccgccgagcaagccgaaagcagtcgagaccccgcgagcccgccccttcggccgctagggagcgacgaactacttccggcgtccgcggaccaactctcgcgacagccagctcaaagcaggcaagaaccggaaggggcggggacgttccccgtgagccttcgcggtgctggctgctcatctgcatacggaagttcggcacattatgaattatttattttcctcgagggaaaaaattaaatgaaaagcaacaaaatacattattaacaagtgagacaaacttcaatggaactggatcatgacctcaacagtcaactacgatagtcatcatacgcctaatgagaatagaattcattacctaggaaataaactaaaaacgtccttaatgatagggacttagggtgatagaagtgcaaagcatgactgtcaaatttttggagcaggttttctgacttcggtcggaaaacccctttcccttcttgtaatacaaaataataacaaccacagaggacatcgcaagtaaaatgtgtataacaaccccatctaaagaaccctatcatctttctactatctgtctacctaaatatgtatagtataaataaccctatatagcactctaagcaacttaagttaggtaacttagaaaactcttttttttttttgagactgagtctcactctgtcgcacccaggctggagtgcagtggcgtgatctcggctcactgcaacctccaccttctgggttcaagtgattctcccatctcagtctcccaagtagctgggattacaggcacgccaccatgccctgctacatttttttttttttagtagagatgaggtttcaccacattggccaggctgttctcgaactcctgacctcaggtgatccgcccaccttggcctcatgaagtgctgggattacaggtgtgagccactgtacccagccagaaaactcttaaaaaac

SEQ ID NO: 612 - DNA, 969 bp, synthetic construct
  source 1..969: mol_type = other DNA
tcgagctccactaggccgaggaccctaaaccccgaagaaaggaaaggcctctcaccgtcctttcgccgccgccccgcgcttcctgatgagttcgtccagggagatgtccgccatcttgctccgccgagcaagccgaaagcagtcgagaccccgcgagcccgccccttcggccgctagggagcgacgaactacttccggcgtccgcggaccaactctcgcgacagccagctcaaagcaggcaagaaccggaaggggcggggacgttccccgtgagccttcgcggtgctggctgctcatctgcatacggaagttcggcacattatgaattatttattttcctcgagggaaaaaattaaatgaaaagcaacaaaatacattattaacaagtgagacaaacttcaatggaactggatcatgacctcaacagtcaactacgatagtcatcatacgcctaatgagaatagaattcattacctaggaaataaactaaaaacgtccttaatgatagggacttagggtgatagaagtgcaaagcatgactgtcaaatttttggagcaggttttctgacttcggtcggaaaacccctctgaattttcttgcagttgaacaacagaggctttttttgtgtgtgtgggggtgcttggttttgggaggttgaagagtacttgttcgcaaactctctaaatgagagatggggaagtgtcttaccagctgattcgcgagagcacctgcaagtttacctgttttagtgatttgcgtttatgaaagttggagttgctgattttgtgatctctacttttaaggtaaaagcagggcggtgttgacttttcttgccagttggctgtcctgttttctttctcgcactgttttctttttgagacgaagtctgtcgctcaggctggagtgcactggcgtgatctcggctcgctgcaaactttgccgaacccctgtttagcgatttccgtttg

SEQ ID NO: 613 - DNA, 1087 bp, synthetic construct
  source 1..1087: mol_type = other DNA
tcgagctccactaggccgaggaccctaaaccccgaagaaaggaaaggcctctcaccgtcctttcgccgccgccccgcgcttcctgatgagttcgtccagggagatgtccgccatcttgctccgccgagcaagccgaaagcagtcgagaccccgcgagcccgccccttcggccgctagggagcgacgaactacttccggcgtccgcggaccaactctcgcgacagccagctcaaagcaggcaagaaccggaaggggcggggacgttccccgtgagccttcgcggtgctggctgctcatctgcatacggaagttcggcacattatgaattatttattttcctcgagggaaaaaattaaatgaaaagcaacaaaatacattattaacaagtgagacaaacttcaatggaactggatcatgacctcaacagtcaactacgatagtcatcatacgcctaatgagaatagaattcattacctaggaaataaactaaaaacgtccttaatgatagggacttagggtgatagaagtgcaaagcatgactgtcaaatttttggagcaggttttctgacttcggtcggaaaacccctatatgtggtaatccaacaatagaaattatttttaagtttgtgtgttcctttttctgttcaatggtgcttttgatattgttgtaaagcagtgactagcagattctgtgtggtaaaagcactgaaccctgtttagttcttttctccctaccttattggtaattatttctgtgtatatatgttccaaagaaatgcggcttgtatattcatgcttttcaactttttgtgatagacagttgatacacaagtagtacctcctccgggatcttcttagtcaagactgtttggtagatgcatgttttttgttacttgtaatgtacagtattcagttcattttctttttgcagcactgtccggttgaaacacaacgcgaggatcgggcgtggtggctcacgcctgtaatcccagcactttgggaggccgaggcaggacaatcaagaccaatcctggtcatcaaggcaggagaatcaagaccatcgaggtcaggagatcaagaccatcct

SEQ ID NO: 614 - DNA, 1085 bp, synthetic construct
  source 1..1085: mol_type = other DNA
tcgagctccactaggccgaggaccctaaaccccgaagaaaggaaaggcctctcaccgtcctttcgccgccgccccgcgcttcctgatgagttcgtccagggagatgtccgccatcttgctccgccgagcaagccgaaagcagtcgagaccccgcgagcccgccccttcggccgctagggagcgacgaactacttccggcgtccgcggaccaactctcgcgacagccagctcaaagcaggcaagaaccggaaggggcggggacgttccccgtgagccttcgcggtgctggctgctcatctgcatacggaagttcggcacattatgaattatttattttcctcgagggaaaaaattaaatgaaaagcaacaaaatacattattaacaagtgagacaaacttcaatggaactggatcatgacctcaacagtcaactacgatagtcatcatacgcctaatgagaatagaattcattacctaggaaataaactaaaaacgtccttaatgatagggacttagggtgatagaagtgcaaagcatgactgtcaaatttttggagcaggttttctgacttcggtcggaaaacccctacatcaggttgtttttctgtttttacatcaggttgtttttctgtttggttttttttttacaccacgtttatacgccggtgcacggtttaccactgaaaacacctttcatctacaggtgatatcttttaacacaaataaaatgtagtagtcctaggagacggaatagaaggaggtggggcctaggcagattcatctctgcggtgcattttgcctctggccctcgggccctagtttgcgatctttcccatcttgcctctgcttccctctgcacaatcctgagtattgcagtaccttacacttaaggaaatttcgtcttgccaaagttgatccatttcagctccgaaacataacaggaactagtgcaacgataaacgtatgaggaacttgcaataagagtgacagaatcctttgaatcaaaaaaaaaaaaagccaccacttaatgagtatctaccatatgtcaagggcttcaccaatatttcattgaaatattccagacca

SEQ ID NO: 615 - DNA, 1087 bp, synthetic construct
  source 1..1087: mol_type = other DNA
tcgagctccactaggccgaggaccctaaaccccgaagaaaggaaaggcctctcaccgtcctttcgccgccgccccgcgcttcctgatgagttcgtccagggagatgtccgccatcttgctccgccgagcaagccgaaagcagtcgagaccccgcgagcccgccccttcggccgctagggagcgacgaactacttccggcgtccgcggaccaactctcgcgacagccagctcaaagcaggcaagaaccggaaggggcggggacgttccccgtgagccttcgcggtgctggctgctcatctgcatacggaagttcggcacattatgaattatttattttcctcgagggaaaaaattaaatgaaaagcaacaaaatacattattaacaagtgagacaaacttcaatggaactggatcatgacctcaacagtcaactacgatagtcatcatacgcctaatgagaatagaattcattacctaggaaataaactaaaaacgtccttaatgatagggacttagggtgatagaagtgcaaagcatgactgtcaaatttttggagcaggttttctgacttcggtcggaaaacccctcttatgatgtttgttgccaatgatagattgttttcactgtgcaaaaattatgggtagttttggtggtcttgatgcagttgtaagcttggggtatgaaggtttgggccacgcctgggcgcttccggctgcgccggatgctgtttcctttccgctcccaggggcgttgggaacggttgtaggacgtggctctttattcgtgagttttccatttacctccgctgaacctagagcttcagacgccctatggcgtccgcctcgacccaaccggcggccttgagcgctgagcaagcaaagggtgagaatcgtcctagtcaaggcataggctgctggcctggggtagtcaaggcatgggctgctggtctggggaggatgcgggcggaggatgtggggcgacaaacctggctacgtccgccgggaaaatggggtaggggacgccgggtaccgtccttctaagtggggcgcttgcccccaagacttgggatcttattgggttacctaca

SEQ ID NO: 616 - DNA, 1085 bp, synthetic construct
  source 1..1085: mol_type = other DNA
tcgagctccactaggccgaggaccctaaaccccgaagaaaggaaaggcctctcaccgtcctttcgccgccgccccgcgcttcctgatgagttcgtccagggagatgtccgccatcttgctccgccgagcaagccgaaagcagtcgagaccccgcgagcccgccccttcggccgctagggagcgacgaactacttccggcgtccgcggaccaactctcgcgacagccagctcaaagcaggcaagaaccggaaggggcggggacgttccccgtgagccttcgcggtgctggctgctcatctgcatacggaagttcggcacattatgaattatttattttcctcgagggaaaaaattaaatgaaaagcaacaaaatacattattaacaagtgagacaaacttcaatggaactggatcatgacctcaacagtcaactacgatagtcatcatacgcctaatgagaatagaattcattacctaggaaataaactaaaaacgtccttaatgatagggacttagggtgatagaagtgcaaagcatgactgtcaaatttttggagcaggttttctgacttcggtcggaaaaccccttctttactgttatatgttaggcgaaatattacgcgtttggagtaagtggtgctttttgtaactgaaaagagattctgtgtgtgtttttttttttttagaggctgcatagttatttgtatgaaccgcaggtgacctaattagcaaggtaattcagacctgtatcctagcacttaagaagtggaagtgggataaccctgcgtgttctcgtgtgggaggctagcttaagcaacaaagcaggaaggccccaccaacaaaagaatttaaaaattatacgtgcgtggtggcgcgcgtatgaggaaattatttggcaactgtgttacagtatagcagcaaatggaatagacctagtccctgactttaggagacctgcctcagccccccgaatggctgggactacaggcgtgcgcctccgcgcccagctaatttttgcatttttggtagagacgggttcaccatgttggccaggatggtctccatctcttcatctggtgatccgcc

SEQ ID NO: 617 - DNA, 1087 bp, synthetic construct
  source 1..1087: mol_type = other DNA
tcgagctccactaggccgaggaccctaaaccccgaagaaaggaaaggcctctcaccgtcctttcgccgccgccccgcgcttcctgatgagttcgtccagggagatgtccgccatcttgctccgccgagcaagccgaaagcagtcgagaccccgcgagcccgccccttcggccgctagggagcgacgaactacttccggcgtccgcggaccaactctcgcgacagccagctcaaagcaggcaagaaccggaaggggcggggacgttccccgtgagccttcgcggtgctggctgctcatctgcatacggaagttcggcacattatgaattatttattttcctcgagggaaaaaattaaatgaaaagcaacaaaatacattattaacaagtgagacaaacttcaatggaactggatcatgacctcaacagtcaactacgatagtcatcatacgcctaatgagaatagaattcattacctaggaaataaactaaaaacgtccttaatgatagggacttagggtgatagaagtgcaaagcatgactgtcaaatttttggagcaggttttctgacttcggtcggaaaacccctaccttattcacgcctaaaaagtagactgactgtggggtggtcgtgttttttgtttcttgttggtaggtggtgaatgcgtttttttcgttgttttctccgttactcaggctgccagttgcttggcagtcttgtcgctggctgtggacgctctgcacttcatcaccgtccccagctgcgctttgagccggtctaaggttgcccacagtattgacgttgggacccacgaaactggcaatttccatgtgtgcggccttacccagttctcccaaacttctgcgtataaccgcttctctgtgcttcagaaagataagtccggccccggcctcacacagcagctcagttcgtgacagcgtttaatatgtaaaatggagcaaataatttatagggcgttgggagagttaaagagactaattcatttacgtgttaaatacagggaatggcttttgcattgatataaccccagcctccagcatgcgccagacctgacgtaggtgttcggc

SEQ ID NO: 618 - DNA, 1087 bp, synthetic construct
  source 1..1087: mol_type = other DNA
tcgagctccactaggccgaggaccctaaaccccgaagaaaggaaaggcctctcaccgtcctttcgccgccgccccgcgcttcctgatgagttcgtccagggagatgtccgccatcttgctccgccgagcaagccgaaagcagtcgagaccccgcgagcccgccccttcggccgctagggagcgacgaactacttccggcgtccgcggaccaactctcgcgacagccagctcaaagcaggcaagaaccggaaggggcggggacgttccccgtgagccttcgcggtgctggctgctcatctgcatacggaagttcggcacattatgaattatttattttcctcgagggaaaaaattaaatgaaaagcaacaaaatacattattaacaagtgagacaaacttcaatggaactggatcatgacctcaacagtcaactacgatagtcatcatacgcctaatgagaatagaattcattacctaggaaataaactaaaaacgtccttaatgatagggacttagggtgatagaagtgcaaagcatgactgtcaaatttttggagcaggttttctgacttcggtcggaaaaccccttttgacccattacccatctaagttagatgcttttttaaatgttttttaatttttaaatttttaatttttttcattatttattttttatttttgagacggatctcggctcactgtaacctccacctcccgggttcaagcgattctcctgactcagcctcccgagtagctgggattacaggcgcgcgccaccatgcccggctaatttttctatttttagtaaagacggggtttcgccatgttgaccagggtggtcttgaactcctgacgtcaggtgatcctcctgcctcgtgctgggattgcaggcgtgagccaccgctcccggcccttagatgctttttaatcagcaagtacgcaatgctttcctgacaggaatgtcaagtccgtcaggaaatccacataagggtgttaagcaggcaaagtaccacatacagattaaaatcaaaagcactgtcaacgcttatttaatttatacagtagaccctaacttttctaattttgtg

SEQ ID NO: 619 - DNA, 1087 bp, synthetic construct
  source 1..1087: mol_type = other DNA
tcgagctccactaggccgaggaccctaaaccccgaagaaaggaaaggcctctcaccgtcctttcgccgccgccccgcgcttcctgatgagttcgtccagggagatgtccgccatcttgctccgccgagcaagccgaaagcagtcgagaccccgcgagcccgccccttcggccgctagggagcgacgaactacttccggcgtccgcggaccaactctcgcgacagccagctcaaagcaggcaagaaccggaaggggcggggacgttccccgtgagccttcgcggtgctggctgctcatctgcatacggaagttcggcacattatgaattatttattttcctcgagggaaaaaattaaatgaaaagcaacaaaatacattattaacaagtgagacaaacttcaatggaactggatcatgacctcaacagtcaactacgatagtcatcatacgcctaatgagaatagaattcattacctaggaaataaactaaaaacgtccttaatgatagggacttagggtgatagaagtgcaaagcatgactgtcaaatttttggagcaggttttctgacttcggtcggaaaacccctgtttacttggttttaaaaatagcttgcactagcgataccgcgaatatggttattaggtttgttaggcacagtcgtgtcttactatagaaaaataacgtagtgttcattttgctgcctgtatgtgttaatttgtccttattgcgccattgttcttgttaagtcttctgtaaggagttgcgggtttcaaactgtcagtctgagagcataagctcacttttcagtcagttgaattgaatgttacattcgattggttctggatattgatattacccaaggcttgtcctgtttgtaagtcttttcctacacctgacaatatgattatgtttacaatgtccctagaactctgggtgtatcgttcccactgaataaaatttgatctctaagttgacctataaatttaagtaccaaaaaactggtttgtaagattttggaaggcagaggcagggaagagaccaacgtggtctacatataaagtaccaggtacatataaagtaccaggt

SEQ ID NO: 620 - DNA, 1083 bp, synthetic construct
  source 1..1083: mol_type = other DNA
tcgagctccactaggccgaggaccctaaaccccgaagaaaggaaaggcctctcaccgtcctttcgccgccgccccgcgcttcctgatgagttcgtccagggagatgtccgccatcttgctccgccgagcaagccgaaagcagtcgagaccccgcgagcccgccccttcggccgctagggagcgacgaactacttccggcgtccgcggaccaactctcgcgacagccagctcaaagcaggcaagaaccggaaggggcggggacgttccccgtgagccttcgcggtgctggctgctcatctgcatacggaagttcggcacattatgaattatttattttcctcgagggaaaaaattaaatgaaaagcaacaaaatacattattaacaagtgagacaaacttcaatggaactggatcatgacctcaacagtcaactacgatagtcatcatacgcctaatgagaatagaattcattacctaggaaataaactaaaaacgtccttaatgatagggacttagggtgatagaagtgcaaagcatgactgtcaaatttttggagcaggttttctgacttcggtcggaaaacccctatttttgtggtgctaaaagttagattgcattccgcccttctcacgtctctttacgtgttgtttgcgaggcgtggcctcggaggtaaatggtctccttttacctcagataagcttacctttgctctgtgagtaagaatgtagctacacttccaaatttagctattgtcctttgcggtccaaatgaaaatattaccttccgatctaacaatgttaaactagtcccaggcccttctatcgattgccagaatagactagactactacacagacacaccctctcaaatcaggccagctcctgcaacctgcacctacagtttgtcccctgggacaaatgaaaggacaggccctctttcccccccccccccaaatcagagcacacacagatcttggggtctggggcagaaatttcgttcatggaaaaaacaaacaaacaaacaaacacgatcaaaggaagctcgttccctttggcctcagggtttcttagacgccgtgttccc

SEQ ID NO: 621 - DNA, 1084 bp, synthetic construct
  source 1..1084: mol_type = other DNA
tcgagctccactaggccgaggaccctaaaccccgaagaaaggaaaggcctctcaccgtcctttcgccgccgccccgcgcttcctgatgagttcgtccagggagatgtccgccatcttgctccgccgagcaagccgaaagcagtcgagaccccgcgagcccgccccttcggccgctagggagcgacgaactacttccggcgtccgcggaccaactctcgcgacagccagctcaaagcaggcaagaaccggaaggggcggggacgttccccgtgagccttcgcggtgctggctgctcatctgcatacggaagttcggcacattatgaattatttattttcctcgagggaaaaaattaaatgaaaagcaacaaaatacattattaacaagtgagacaaacttcaatggaactggatcatgacctcaacagtcaactacgatagtcatcatacgcctaatgagaatagaattcattacctaggaaataaactaaaaacgtccttaatgatagggacttagggtgatagaagtgcaaagcatgactgtcaaatttttggagcaggttttctgacttcggtcggaaaacccctataactggtaaccaaaagcagattactttcccccttgtggtcttcgcgtttgcggacgggagagaactttcggccattttccttttagaaatttaacttcttgaaggccaccaggtgacccttacttccctctcacctttccttctacctgtactttctctattaaaaagcctgcagaagtacccttgacaaattgccaaaaatgacacctaaaaaaaaaaaaaggaaaaacgacaccttaggtaattataggttgtaagaaaaagatttgacctcttggagtttttatttcttaataccaaaggacacccaaggaacgtatctctcaaaattgggtttcaaacctcagccgtttccttcttagttccagtgcttaacacgcaacagacctgcacaccactacactgcatacgagttttaaagttaataaatcagtcacccctccatagtcttctacctacttgaagacagaaacggctgctaggaagcaattcttc

SEQ ID NO: 622 - DNA, 1087 bp, synthetic construct
  source 1..1087: mol_type = other DNA
tcgagctccactaggccgaggaccctaaaccccgaagaaaggaaaggcctctcaccgtcctttcgccgccgccccgcgcttcctgatgagttcgtccagggagatgtccgccatcttgctccgccgagcaagccgaaagcagtcgagaccccgcgagcccgccccttcggccgctagggagcgacgaactacttccggcgtccgcggaccaactctcgcgacagccagctcaaagcaggcaagaaccggaaggggcggggacgttccccgtgagccttcgcggtgctggctgctcatctgcatacggaagttcggcacattatgaattatttattttcctcgagggaaaaaattaaatgaaaagcaacaaaatacattattaacaagtgagacaaacttcaatggaactggatcatgacctcaacagtcaactacgatagtcatcatacgcctaatgagaatagaattcattacctaggaaataaactaaaaacgtccttaatgatagggacttagggtgatagaagtgcaaagcatgactgtcaaatttttggagcaggttttctgacttcggtcggaaaacccctctggggaataagagtggtttaaagaaagaacaatttgagagatctgcttagatctaataaaacccaagtatagtttctttagacgtcttatatctcacgtaggacctcttatttcagactcactgcaagaacaagctaaagaactatatacagtcaggaacaaggtgagccatcgcggttctcagtcccatgatcttaagagtttttcctcttcccctcttccctggctgtcctggagctcactctgtagaccaggctggtctcaaactcagaaatccacttacctctgcctcccaagggctgggattaaaggcatgcaccaccattgcccggcagggtatgtggactatgctgtccttcaactcagagatcgtggtactttaaatctcattttccgaaagaaaagaaaagaaaggaaggggggaaataaagccagtatattttgcacccacaatctgaagttctacaaatattgttagaaaatgcaaaggacccaagtc

SEQ ID NO: 623 - DNA, 1087 bp, synthetic construct
  source 1..1087: mol_type = other DNA
tcgagctccactaggccgaggaccctaaaccccgaagaaaggaaaggcctctcaccgtcctttcgccgccgccccgcgcttcctgatgagttcgtccagggagatgtccgccatcttgctccgccgagcaagccgaaagcagtcgagaccccgcgagcccgccccttcggccgctagggagcgacgaactacttccggcgtccgcggaccaactctcgcgacagccagctcaaagcaggcaagaaccggaaggggcggggacgttccccgtgagccttcgcggtgctggctgctcatctgcatacggaagttcggcacattatgaattatttattttcctcgagggaaaaaattaaatgaaaagcaacaaaatacattattaacaagtgagacaaacttcaatggaactggatcatgacctcaacagtcaactacgatagtcatcatacgcctaatgagaatagaattcattacctaggaaataaactaaaaacgtccttaatgatagggacttagggtgatagaagtgcaaagcatgactgtcaaatttttggagcaggttttctgacttcggtcggaaaacccctctcggtttatcttaaagggttttaaatatagaaagcttccttagtcttatgggtgagagtgctgtttaagccttacctaggtatgtctttgaacatttattacagattgttatttgtgactatgaccactcaggtgttctgttcttgtgaatttagacacactcagaaaggctacacactcaaagaccacaccaaagtgaagtactatctgggccgtgaaactggtcacatatcagttattttgcagtaaaacaaggaagtcaatcatactgcttcagtgggtcagggagtcaagaatgcacagtacaagagctggtgagattcctcagcaggtaagagcactgaatgctcttccaaagattctgagttcaaatcccagcaaccacgtggtggatttgaacaaaggatgaaaacaaccatccataaccagatctgatgccctcttctggagtgtcaaaagacagctatggtgtacttacataaataaataagtaaaaaca

SEQ ID NO: 624 - DNA, 1087 bp, synthetic construct
  source 1..1087: mol_type = other DNA
tcgagctccactaggccgaggaccctaaaccccgaagaaaggaaaggcctctcaccgtcctttcgccgccgccccgcgcttcctgatgagttcgtccagggagatgtccgccatcttgctccgccgagcaagccgaaagcagtcgagaccccgcgagcccgccccttcggccgctagggagcgacgaactacttccggcgtccgcggaccaactctcgcgacagccagctcaaagcaggcaagaaccggaaggggcggggacgttccccgtgagccttcgcggtgctggctgctcatctgcatacggaagttcggcacattatgaattatttattttcctcgagggaaaaaattaaatgaaaagcaacaaaatacattattaacaagtgagacaaacttcaatggaactggatcatgacctcaacagtcaactacgatagtcatcatacgcctaatgagaatagaattcattacctaggaaataaactaaaaacgtccttaatgatagggacttagggtgatagaagtgcaaagcatgactgtcaaatttttggagcaggttttctgacttcggtcggaaaacccctccacattttgtgtttaaaaatagaaatatttaagtgagatcagtttaaatctgctttatctagggtgtctaactgcttgcatctttttaacttttccttatttgtgagaaggtctgtaaaacttattatatgttagtacactgtagctgtcttcagacactccagaagagggattcagatcaccttacagatggttttgagccaccatgtggttgctgggatttgaactcaggacctttagaaaagtagttgggtgctcttacccgctgagccatctcaccagccctttttttttcttttttccagttcgggtttctctgtgtgtagccctggctgtcctggaactcattctgtagaccgggctggcctcgaactcagaaatctgcctgcctctgcctcccaagtgctgggattaaaggaatgtgccttcattgcccggctctagggctttttgttgttgtttgtttgtttgtttgtttgtttgcttttgtggatggcct

SEQ ID NO: 625 - DNA, 1087 bp, synthetic construct
  source 1..1087: mol_type = other DNA
tcgagctccactaggccgaggaccctaaaccccgaagaaaggaaaggcctctcaccgtcctttcgccgccgccccgcgcttcctgatgagttcgtccagggagatgtccgccatcttgctccgccgagcaagccgaaagcagtcgagaccccgcgagcccgccccttcggccgctagggagcgacgaactacttccggcgtccgcggaccaactctcgcgacagccagctcaaagcaggcaagaaccggaaggggcggggacgttccccgtgagccttcgcggtgctggctgctcatctgcatacggaagttcggcacattatgaattatttattttcctcgagggaaaaaattaaatgaaaagcaacaaaatacattattaacaagtgagacaaacttcaatggaactggatcatgacctcaacagtcaactacgatagtcatcatacgcctaatgagaatagaattcattacctaggaaataaactaaaaacgtccttaatgatagggacttagggtgatagaagtgcaaagcatgactgtcaaatttttggagcaggttttctgacttcggtcggaaaacccctaaaaccagtaagggagaaaggtcaagtaacatataaaggaaggcctatcagaattacaccagacttttcaccagagactatgaaagccagaagagcctggacagatgttatacagacactaagagaacacaaatgccagcccaggctactatacctggccaaactctcaattaccatagatggagaaaccaaagtattccacgacaaaaacaaattcacacaatatctttccacgaatccagcccttcaaaggataatgacagaaaagaagcaatacaaggacggaaatcacgccctagaacaaccaagaaactaatcattcaacaaaccaaaaagaagacagccacaagaacagaatgccaactctaacaacaaaaataaaaggaagcaacaattacttttccttaatatctcttaatatcaatggactcaattccccaataaaaagacatagactaacagactggctacacaaacaggacccaacattctgctgctta

SEQ ID NO: 626 - DNA, 1087 bp, synthetic construct
  source 1..1087: mol_type = other DNA
tcgagctccactaggccgaggaccctaaaccccgaagaaaggaaaggcctctcaccgtcctttcgccgccgccccgcgcttcctgatgagttcgtccagggagatgtccgccatcttgctccgccgagcaagccgaaagcagtcgagaccccgcgagcccgccccttcggccgctagggagcgacgaactacttccggcgtccgcggaccaactctcgcgacagccagctcaaagcaggcaagaaccggaaggggcggggacgttccccgtgagccttcgcggtgctggctgctcatctgcatacggaagttcggcacattatgaattatttattttcctcgagggaaaaaattaaatgaaaagcaacaaaatacattattaacaagtgagacaaacttcaatggaactggatcatgacctcaacagtcaactacgatagtcatcatacgcctaatgagaatagaattcattacctaggaaataaactaaaaacgtccttaatgatagggacttagggtgatagaagtgcaaagcatgactgtcaaatttttggagcaggttttctgacttcggtcggaaaacccctcccaatttcactggtctacaatgaaagcaaaacagttctcttccccgctccccggtgtgtgagaggggctttgatccttctctggtttcctaggaaacgcgtatgtgctagagccacgctctgagacttccgcctcgtgcggtcccgcttcctttctgcctcctctggcctgcatccgtgggggaggtggctggctgcagggttctccggatctcttctgtgttcccactactcaagcaccgagtggcgttctatggcgtccgcctcggctcagcccgcggccctgagcgcggagcaggccaagggtgaggaaagagcctagtctgggtgtgggccgtcttctggggggagggcgcgatactattctttgcctctccaagtggggcccttgcccattagggcgaagggttgggaggacaagcttatcgggttgcttgcaggcctcggcccactaattccctgcctcttccctcctctgggctcgcccgccgtcctccgcg

SEQ ID NO: 627 - DNA, 1087 bp, synthetic construct
  source 1..1087: mol_type = other DNA
tcgagctccactaggccgaggaccctaaaccccgaagaaaggaaaggcctctcaccgtcctttcgccgccgccccgcgcttcctgatgagttcgtccagggagatgtccgccatcttgctccgccgagcaagccgaaagcagtcgagaccccgcgagcccgccccttcggccgctagggagcgacgaactacttccggcgtccgcggaccaactctcgcgacagccagctcaaagcaggcaagaaccggaaggggcggggacgttccccgtgagccttcgcggtgctggctgctcatctgcatacggaagttcggcacattatgaattatttattttcctcgagggaaaaaattaaatgaaaagcaacaaaatacattattaacaagtgagacaaacttcaatggaactggatcatgacctcaacagtcaactacgatagtcatcatacgcctaatgagaatagaattcattacctaggaaataaactaaaaacgtccttaatgatagggacttagggtgatagaagtgcaaagcatgactgtcaaatttttggagcaggttttctgacttcggtcggaaaacccctgaatttgttaaattacaggaggaagcttttttagttcattttacaaatactttcttgttaggtagataataccttctaaggttattatctggatcttctaagtctttttatcgctagcaagtctaagtttctggactttggaattagaagttaatgtcgtaggcgggcatggtggtccacgcctttaatcccagagtttgggaggcagacgcaggtggttttctgagttcgaggccatcctgctcttcaatgttagttccaggacagccagggttatacaaagaaaccctgtctcgagaaacaaaacaaacaaaaaaagagtagctgagtgctctgagttgtctctccagccccttagctatttattttcatttaaattatttttgttttattcgcttgtgtgcctgagtttgaatttcccgggattaacagttgaagactagggctggtgagatggctcagcggttaagattgccgactgctcttccaaaggtcctgag

SEQ ID NO: 628 - DNA, 1087 bp, synthetic construct
  source 1..1087: mol_type = other DNA
tcgagctccactaggccgaggaccctaaaccccgaagaaaggaaaggcctctcaccgtcctttcgccgccgccccgcgcttcctgatgagttcgtccagggagatgtccgccatcttgctccgccgagcaagccgaaagcagtcgagaccccgcgagcccgccccttcggccgctagggagcgacgaactacttccggcgtccgcggaccaactctcgcgacagccagctcaaagcaggcaagaaccggaaggggcggggacgttccccgtgagccttcgcggtgctggctgctcatctgcatacggaagttcggcacattatgaattatttattttcctcgagggaaaaaattaaatgaaaagcaacaaaatacattattaacaagtgagacaaacttcaatggaactggatcatgacctcaacagtcaactacgatagtcatcatacgcctaatgagaatagaattcattacctaggaaataaactaaaaacgtccttaatgatagggacttagggtgatagaagtgcaaagcatgactgtcaaatttttggagcaggttttctgacttcggtcggaaaacccctaccccctaattctacaagaatagaaagcttagcagctcctctgaatggttgctctcaggtgctagtggttgcaagtcgtatgttgatgcctgcctttgccctacctggtgtgtgagcgtgagcgcgccccacctctccagcctctctcttactgtttttcagacaagatgggactgttgttctcctactgctatgtacctcaatttcaattgatcatgcctggacataactgcccatgttgtaaggtcgtctacgttgtaaggtcgtgctcagtttctgatgcctagactagtcacctttccgtttgcctcctgactgtgtaaatgaggcaaatgaaggtggtctcttaactgacatgttagtgtttgacctatgggatagtttctcattgttgagacagaatttctagaagctggtccgctgagcggctaagagcacttgctgatattgcaaaggatctacctgggtttggttctcagcactcacatggaagttcacat

SEQ ID NO: 629 - DNA, 654 bp, synthetic construct
  source 1..654: mol_type = other DNA
tcgagctccactaggccgaggaccctaaaccccgaagaaaggaaaggcctctcaccgtcctttcgccgccgccccgcgcttcctgatgagttcgtccagggagatgtccgccatcttgctccgccgagcaagccgaaagcagtcgagaccccgcgagcccgccccttcggccgctagggagcgacgaactacttccggcgtccgcggaccaactctcgcgacagccagctcaaagcaggcaagaaccggaaggggcggggacgttccccgtgagccttcgcggtgctggctgctcatctgcatacggaagttcggcacattatgaattatttattttcctcgagggaaaaaattaaatgaaaagcaacaaaatacattattaacaagtgagacaaacttcaatggaactggatcatgacctcaacagtcaactacgatagtcatcatacgcctaatgagaatagaattcattacctaggaaataaactaaaaacgtccttaatgatagggacttagggtgatagaagtgcaaagcatgactgtcaaatttttggagcaggttttctgacttcggtcggaaaaccccttgtagttcctgcaatttaattttcgtttaaaactttattttattctttaacttaaaaaaaatatata

SEQ ID NO: 630 - DNA, 1087 bp, synthetic construct
  source 1..1087: mol_type = other DNA
gacaagagaaggactgaactgggggagtgagggaagaatgcgagagtgagactcagagagtaaaggggagggaaaaaaaagaagagagaaagggcgaggaagggggcgaccgcaggagggagacagacctggagtccactcggaggcctggagccgcacaaagcgccaggtcagcggtcccggctgggtgagaccagcaggcggctctagcgcgcgggagctgggcgaggctccgggacgacctcaccaatggagactgcagtatttagcatgccccacccatctgcaaggcattctggatagtgtcaaaacagccggaaatcaagtccgtttatctcaaactttagcattttgggaataaatgatatttgctatgctggttaaattagattttagttaaatttcctgctgaagctctagtacgataagcaacttgacctaagtgtaaagttgagacttccttcaggtttatatagcttgtgcgccgcttgggtacctcgaatgatagggacttagggtgatagaagtgcaaagcatgactgtcaaatttttggagcaggttttctgacttcggtcggaaaacccctactttctggagtttcaaaaacagactgtacgccaagggtcatatctttttttgtattggtttgtgtcttggttggtgtcttaggtgttaatcctacagtggagggtttatgggaataggaagtaacatgtcgcctgcatgtcataggagaaaaagcgagcatcagccgtatcggctttgtaacacaaattagctatcgtgaagtccgctcagctcttccctttctaccctggctgctttttgcagggattggtccgtggtctccagtctcttgggttctcaccctgtgtgaaaatcttcgtgtttttccctaccccccagtcacctcttacacagcctctgcttccaagcgcagcccccacaggagtttgtaggatttctgtgctagcggggaatgtgttctcacctcatagagccaggtagaaattatgcagatgggcagttctctgggaagaaagcagggcctttggggctctcagtgtccccgttgggttgtagaca

SEQ ID NO: 631 - DNA, 1087 bp, synthetic construct
  source 1..1087: mol_type = other DNA
gacaagagaaggactgaactgggggagtgagggaagaatgcgagagtgagactcagagagtaaaggggagggaaaaaaaagaagagagaaagggcgaggaagggggcgaccgcaggagggagacagacctggagtccactcggaggcctggagccgcacaaagcgccaggtcagcggtcccggctgggtgagaccagcaggcggctctagcgcgcgggagctgggcgaggctccgggacgacctcaccaatggagactgcagtatttagcatgccccacccatctgcaaggcattctggatagtgtcaaaacagccggaaatcaagtccgtttatctcaaactttagcattttgggaataaatgatatttgctatgctggttaaattagattttagttaaatttcctgctgaagctctagtacgataagcaacttgacctaagtgtaaagttgagacttccttcaggtttatatagcttgtgcgccgcttgggtacctcgaatgatagggacttagggtgatagaagtgcaaagcatgactgtcaaatttttggagcaggttttctgacttcggtcggaaaacccctactttctggagtttctaaaagtagactgtacgctaagggtcatatctttttttgttttggtttgtgtcttggttggcgtcttaaatgttaatcctacagtggagggctggcgaataggaagtaacatgtcgcctgcacgccataggagaaaaagcgagcatcagccgtatcggctttgtaacacaaattagctatcgtgaagtccgctcagctcttccctttctaccctggctgctttttgcagggattggtccgtggtctccagtctcttgggttctcaccctgtgtgaaaatcttcctgtttttccctaccccccaagtcacctcttacacagcctctgcttccaagcgcagcccccacaggagtttgtaggatttctgtgctagcggggagtgtgttctcacctcatagagccaggtagaaactacgcagatgggtgctgttctccaggaagaaagcagggcctttggggctctcagtgtccccgttgggttgtaga

SEQ ID NO: 632 - DNA, 1087 bp, synthetic construct
  source 1..1087: mol_type = other DNA
gacaagagaaggactgaactgggggagtgagggaagaatgcgagagtgagactcagagagtaaaggggagggaaaaaaaagaagagagaaagggcgaggaagggggcgaccgcaggagggagacagacctggagtccactcggaggcctggagccgcacaaagcgccaggtcagcggtcccggctgggtgagaccagcaggcggctctagcgcgcgggagctgggcgaggctccgggacgacctcaccaatggagactgcagtatttagcatgccccacccatctgcaaggcattctggatagtgtcaaaacagccggaaatcaagtccgtttatctcaaactttagcattttgggaataaatgatatttgctatgctggttaaattagattttagttaaatttcctgctgaagctctagtacgataagcaacttgacctaagtgtaaagttgagacttccttcaggtttatatagcttgtgcgccgcttgggtacctcgaatgatagggacttagggtgatagaagtgcaaagcatgactgtcaaatttttggagcaggttttctgacttcggtcggaaaacccctactttctggagtttcaaaaacagaccgtacgccaagggtcatgtcttttttcgtattggtttgtgtcttagttgttaatcctacagtggaggcctggggaataagaagtaacatgtggcctgcacgccataggagaaaaagcgagcatcagccgtatcggctttgtaacacaaattagctatcgtgaagtccgctcagctcttccatttctaccctggctgctttttgcagggattggtccgtggtctccagtctcttgggttctcaccctgtgtgaaaatcttcgtgtttttccctaccccccaagtcacctcttacacagcctctgcttccaagcgcagcccccacaggagtttgtaggatttctgtgctagcggggagtgtgttctcacctcatagagccaggtagaaattatgcagatgggcgctgttctctgggaagaaagcagggcctttggggctctcagtgtccccgttgggttgtagacataacactctta

SEQ ID NO: 633 - DNA, 891 bp, synthetic construct
  source 1..891: mol_type = other DNA
gacaagagaaggactgaactgggggagtgagggaagaatgcgagagtgagactcagagagtaaaggggagggaaaaaaaagaagagagaaagggcgaggaagggggcgaccgcaggagggagacagacctggagtccactcggaggcctggagccgcacaaagcgccaggtcagcggtcccggctgggtgagaccagcaggcggctctagcgcgcgggagctgggcgaggctccgggacgacctcaccaatggagactgcagtatttagcatgccccacccatctgcaaggcattctggatagtgtcaaaacagccggaaatcaagtccgtttatctcaaactttagcattttgggaataaatgatatttgctatgctggttaaattagattttagttaaatttcctgctgaagctctagtacgataagcaacttgacctaagtgtaaagttgagacttccttcaggtttatatagcttgtgcgccgcttgggtacctcgaatgatagggacttagggtgatagaagtgcaaagcatgactgtcaaatttttggagcaggttttctgacttcggtcggaaaacccctcctccggggatacaacgtgtttcctaaaagtagagggaggtaagagacggtagcacctgcggggcggcttgcacgccgagtgcctgtgacgcgccggcttaacttaactgcttccctgaagtaccttgaggttcctgatgtgcgggcggtagacggtaggcttatgcggcacgctgtcgtttccaccgtggctactgcgctttgggaaggccacgacctcctcctttggggaggtccttaggatctcagcttggcagtcgagtgggtggcgaccttttaaaggaatgggacccacccggagttc

SEQ ID NO: 634 - DNA, 1079 bp, synthetic construct
  source 1..1079: mol_type = other DNA
gacaagagaaggactgaactgggggagtgagggaagaatgcgagagtgagactcagagagtaaaggggagggaaaaaaaagaagagagaaagggcgaggaagggggcgaccgcaggagggagacagacctggagtccactcggaggcctggagccgcacaaagcgccaggtcagcggtcccggctgggtgagaccagcaggcggctctagcgcgcgggagctgggcgaggctccgggacgacctcaccaatggagactgcagtatttagcatgccccacccatctgcaaggcattctggatagtgtcaaaacagccggaaatcaagtccgtttatctcaaactttagcattttgggaataaatgatatttgctatgctggttaaattagattttagttaaatttcctgctgaagctctagtacgataagcaacttgacctaagtgtaaagttgagacttccttcaggtttatatagcttgtgcgccgcttgggtacctcgaatgatagggacttagggtgatagaagtgcaaagcatgactgtcaaatttttggagcaggttttctgacttcggtcggaaaacccctttcccttcttgtaatacaaaataataacaaccacagaggacatcgcaagtaaaatgtgtataacaaccccatctaaagaaccctatcatctttctactatctgtctacctaaatatgtatagtataaataaccctatatagcactctaagcaacttaagttaggtaacttagaaaactcttttttttttttgagactgagtctcactctgtcgcacccaggctggagtgcagtggcgtgatctcggctcactgcaacctccaccttctgggttcaagtgattctcccatctcagtctcccaagtagctgggattacaggcacgccaccatgccctgctacatttttttttttttagtagagatgaggtttcaccacattggccaggctgttctcgaactcctgacctcaggtgatccgcccaccttggcctcatgaagtgctgggattacaggtgtgagccactgtacccagccagaaaactcttaaaaaac

SEQ ID NO: 635 - DNA, 969 bp, synthetic construct
  source 1..969: mol_type = other DNA
gacaagagaaggactgaactgggggagtgagggaagaatgcgagagtgagactcagagagtaaaggggagggaaaaaaaagaagagagaaagggcgaggaagggggcgaccgcaggagggagacagacctggagtccactcggaggcctggagccgcacaaagcgccaggtcagcggtcccggctgggtgagaccagcaggcggctctagcgcgcgggagctgggcgaggctccgggacgacctcaccaatggagactgcagtatttagcatgccccacccatctgcaaggcattctggatagtgtcaaaacagccggaaatcaagtccgtttatctcaaactttagcattttgggaataaatgatatttgctatgctggttaaattagattttagttaaatttcctgctgaagctctagtacgataagcaacttgacctaagtgtaaagttgagacttccttcaggtttatatagcttgtgcgccgcttgggtacctcgaatgatagggacttagggtgatagaagtgcaaagcatgactgtcaaatttttggagcaggttttctgacttcggtcggaaaacccctctgaattttcttgcagttgaacaacagaggctttttttgtgtgtgtgggggtgcttggttttgggaggttgaagagtacttgttcgcaaactctctaaatgagagatggggaagtgtcttaccagctgattcgcgagagcacctgcaagtttacctgttttagtgatttgcgtttatgaaagttggagttgctgattttgtgatctctacttttaaggtaaaagcagggcggtgttgacttttcttgccagttggctgtcctgttttctttctcgcactgttttctttttgagacgaagtctgtcgctcaggctggagtgcactggcgtgatctcggctcgctgcaaactttgccgaacccctgtttagcgatttccgtttg

SEQ ID NO: 636 - DNA, 1087 bp, synthetic construct
  source 1..1087: mol_type = other DNA
gacaagagaaggactgaactgggggagtgagggaagaatgcgagagtgagactcagagagtaaaggggagggaaaaaaaagaagagagaaagggcgaggaagggggcgaccgcaggagggagacagacctggagtccactcggaggcctggagccgcacaaagcgccaggtcagcggtcccggctgggtgagaccagcaggcggctctagcgcgcgggagctgggcgaggctccgggacgacctcaccaatggagactgcagtatttagcatgccccacccatctgcaaggcattctggatagtgtcaaaacagccggaaatcaagtccgtttatctcaaactttagcattttgggaataaatgatatttgctatgctggttaaattagattttagttaaatttcctgctgaagctctagtacgataagcaacttgacctaagtgtaaagttgagacttccttcaggtttatatagcttgtgcgccgcttgggtacctcgaatgatagggacttagggtgatagaagtgcaaagcatgactgtcaaatttttggagcaggttttctgacttcggtcggaaaacccctatatgtggtaatccaacaatagaaattatttttaagtttgtgtgttcctttttctgttcaatggtgcttttgatattgttgtaaagcagtgactagcagattctgtgtggtaaaagcactgaaccctgtttagttcttttctccctaccttattggtaattatttctgtgtatatatgttccaaagaaatgcggcttgtatattcatgcttttcaactttttgtgatagacagttgatacacaagtagtacctcctccgggatcttcttagtcaagactgtttggtagatgcatgttttttgttacttgtaatgtacagtattcagttcattttctttttgcagcactgtccggttgaaacacaacgcgaggatcgggcgtggtggctcacgcctgtaatcccagcactttgggaggccgaggcaggacaatcaagaccaatcctggtcatcaaggcaggagaatcaagaccatcgaggtcaggagatcaagaccatcct

SEQ ID NO: 637 - DNA, 1085 bp, synthetic construct
  source 1..1085: mol_type = other DNA
gacaagagaaggactgaactgggggagtgagggaagaatgcgagagtgagactcagagagtaaaggggagggaaaaaaaagaagagagaaagggcgaggaagggggcgaccgcaggagggagacagacctggagtccactcggaggcctggagccgcacaaagcgccaggtcagcggtcccggctgggtgagaccagcaggcggctctagcgcgcgggagctgggcgaggctccgggacgacctcaccaatggagactgcagtatttagcatgccccacccatctgcaaggcattctggatagtgtcaaaacagccggaaatcaagtccgtttatctcaaactttagcattttgggaataaatgatatttgctatgctggttaaattagattttagttaaatttcctgctgaagctctagtacgataagcaacttgacctaagtgtaaagttgagacttccttcaggtttatatagcttgtgcgccgcttgggtacctcgaatgatagggacttagggtgatagaagtgcaaagcatgactgtcaaatttttggagcaggttttctgacttcggtcggaaaacccctacatcaggttgtttttctgtttttacatcaggttgtttttctgtttggttttttttttacaccacgtttatacgccggtgcacggtttaccactgaaaacacctttcatctacaggtgatatcttttaacacaaataaaatgtagtagtcctaggagacggaatagaaggaggtggggcctaggcagattcatctctgcggtgcattttgcctctggccctcgggccctagtttgcgatctttcccatcttgcctctgcttccctctgcacaatcctgagtattgcagtaccttacacttaaggaaatttcgtcttgccaaagttgatccatttcagctccgaaacataacaggaactagtgcaacgataaacgtatgaggaacttgcaataagagtgacagaatcctttgaatcaaaaaaaaaaaaagccaccacttaatgagtatctaccatatgtcaagggcttcaccaatatttcattgaaatattccagacca

SEQ ID NO: 638 - DNA, 1087 bp, synthetic construct
  source 1..1087: mol_type = other DNA
gacaagagaaggactgaactgggggagtgagggaagaatgcgagagtgagactcagagagtaaaggggagggaaaaaaaagaagagagaaagggcgaggaagggggcgaccgcaggagggagacagacctggagtccactcggaggcctggagccgcacaaagcgccaggtcagcggtcccggctgggtgagaccagcaggcggctctagcgcgcgggagctgggcgaggctccgggacgacctcaccaatggagactgcagtatttagcatgccccacccatctgcaaggcattctggatagtgtcaaaacagccggaaatcaagtccgtttatctcaaactttagcattttgggaataaatgatatttgctatgctggttaaattagattttagttaaatttcctgctgaagctctagtacgataagcaacttgacctaagtgtaaagttgagacttccttcaggtttatatagcttgtgcgccgcttgggtacctcgaatgatagggacttagggtgatagaagtgcaaagcatgactgtcaaatttttggagcaggttttctgacttcggtcggaaaacccctcttatgatgtttgttgccaatgatagattgttttcactgtgcaaaaattatgggtagttttggtggtcttgatgcagttgtaagcttggggtatgaaggtttgggccacgcctgggcgcttccggctgcgccggatgctgtttcctttccgctcccaggggcgttgggaacggttgtaggacgtggctctttattcgtgagttttccatttacctccgctgaacctagagcttcagacgccctatggcgtccgcctcgacccaaccggcggccttgagcgctgagcaagcaaagggtgagaatcgtcctagtcaaggcataggctgctggcctggggtagtcaaggcatgggctgctggtctggggaggatgcgggcggaggatgtggggcgacaaacctggctacgtccgccgggaaaatggggtaggggacgccgggtaccgtccttctaagtggggcgcttgcccccaagacttgggatcttattgggttacctaca

SEQ ID NO: 639 - DNA, 1085 bp, synthetic construct
  source 1..1085: mol_type = other DNA
gacaagagaaggactgaactgggggagtgagggaagaatgcgagagtgagactcagagagtaaaggggagggaaaaaaaagaagagagaaagggcgaggaagggggcgaccgcaggagggagacagacctggagtccactcggaggcctggagccgcacaaagcgccaggtcagcggtcccggctgggtgagaccagcaggcggctctagcgcgcgggagctgggcgaggctccgggacgacctcaccaatggagactgcagtatttagcatgccccacccatctgcaaggcattctggatagtgtcaaaacagccggaaatcaagtccgtttatctcaaactttagcattttgggaataaatgatatttgctatgctggttaaattagattttagttaaatttcctgctgaagctctagtacgataagcaacttgacctaagtgtaaagttgagacttccttcaggtttatatagcttgtgcgccgcttgggtacctcgaatgatagggacttagggtgatagaagtgcaaagcatgactgtcaaatttttggagcaggttttctgacttcggtcggaaaaccccttctttactgttatatgttaggcgaaatattacgcgtttggagtaagtggtgctttttgtaactgaaaagagattctgtgtgtgtttttttttttttagaggctgcatagttatttgtatgaaccgcaggtgacctaattagcaaggtaattcagacctgtatcctagcacttaagaagtggaagtgggataaccctgcgtgttctcgtgtgggaggctagcttaagcaacaaagcaggaaggccccaccaacaaaagaatttaaaaattatacgtgcgtggtggcgcgcgtatgaggaaattatttggcaactgtgttacagtatagcagcaaatggaatagacctagtccctgactttaggagacctgcctcagccccccgaatggctgggactacaggcgtgcgcctccgcgcccagctaatttttgcatttttggtagagacgggttcaccatgttggccaggatggtctccatctcttcatctggtgatccgcc

SEQ ID NO: 640 - DNA, 1087 bp, synthetic construct
  source 1..1087: mol_type = other DNA
gacaagagaaggactgaactgggggagtgagggaagaatgcgagagtgagactcagagagtaaaggggagggaaaaaaaagaagagagaaagggcgaggaagggggcgaccgcaggagggagacagacctggagtccactcggaggcctggagccgcacaaagcgccaggtcagcggtcccggctgggtgagaccagcaggcggctctagcgcgcgggagctgggcgaggctccgggacgacctcaccaatggagactgcagtatttagcatgccccacccatctgcaaggcattctggatagtgtcaaaacagccggaaatcaagtccgtttatctcaaactttagcattttgggaataaatgatatttgctatgctggttaaattagattttagttaaatttcctgctgaagctctagtacgataagcaacttgacctaagtgtaaagttgagacttccttcaggtttatatagcttgtgcgccgcttgggtacctcgaatgatagggacttagggtgatagaagtgcaaagcatgactgtcaaatttttggagcaggttttctgacttcggtcggaaaacccctaccttattcacgcctaaaaagtagactgactgtggggtggtcgtgttttttgtttcttgttggtaggtggtgaatgcgtttttttcgttgttttctccgttactcaggctgccagttgcttggcagtcttgtcgctggctgtggacgctctgcacttcatcaccgtccccagctgcgctttgagccggtctaaggttgcccacagtattgacgttgggacccacgaaactggcaatttccatgtgtgcggccttacccagttctcccaaacttctgcgtataaccgcttctctgtgcttcagaaagataagtccggccccggcctcacacagcagctcagttcgtgacagcgtttaatatgtaaaatggagcaaataatttatagggcgttgggagagttaaagagactaattcatttacgtgttaaatacagggaatggcttttgcattgatataaccccagcctccagcatgcgccagacctgacgtaggtgttcggc

SEQ ID NO: 641 - DNA, 1087 bp, synthetic construct
  source 1..1087: mol_type = other DNA
gacaagagaaggactgaactgggggagtgagggaagaatgcgagagtgagactcagagagtaaaggggagggaaaaaaaagaagagagaaagggcgaggaagggggcgaccgcaggagggagacagacctggagtccactcggaggcctggagccgcacaaagcgccaggtcagcggtcccggctgggtgagaccagcaggcggctctagcgcgcgggagctgggcgaggctccgggacgacctcaccaatggagactgcagtatttagcatgccccacccatctgcaaggcattctggatagtgtcaaaacagccggaaatcaagtccgtttatctcaaactttagcattttgggaataaatgatatttgctatgctggttaaattagattttagttaaatttcctgctgaagctctagtacgataagcaacttgacctaagtgtaaagttgagacttccttcaggtttatatagcttgtgcgccgcttgggtacctcgaatgatagggacttagggtgatagaagtgcaaagcatgactgtcaaatttttggagcaggttttctgacttcggtcggaaaaccccttttgacccattacccatctaagttagatgcttttttaaatgttttttaatttttaaatttttaatttttttcattatttattttttatttttgagacggatctcggctcactgtaacctccacctcccgggttcaagcgattctcctgactcagcctcccgagtagctgggattacaggcgcgcgccaccatgcccggctaatttttctatttttagtaaagacggggtttcgccatgttgaccagggtggtcttgaactcctgacgtcaggtgatcctcctgcctcgtgctgggattgcaggcgtgagccaccgctcccggcccttagatgctttttaatcagcaagtacgcaatgctttcctgacaggaatgtcaagtccgtcaggaaatccacataagggtgttaagcaggcaaagtaccacatacagattaaaatcaaaagcactgtcaacgcttatttaatttatacagtagaccctaacttttctaattttgtg

SEQ ID NO: 642 - DNA, 1087 bp, synthetic construct
  source 1..1087: mol_type = other DNA
gacaagagaaggactgaactgggggagtgagggaagaatgcgagagtgagactcagagagtaaaggggagggaaaaaaaagaagagagaaagggcgaggaagggggcgaccgcaggagggagacagacctggagtccactcggaggcctggagccgcacaaagcgccaggtcagcggtcccggctgggtgagaccagcaggcggctctagcgcgcgggagctgggcgaggctccgggacgacctcaccaatggagactgcagtatttagcatgccccacccatctgcaaggcattctggatagtgtcaaaacagccggaaatcaagtccgtttatctcaaactttagcattttgggaataaatgatatttgctatgctggttaaattagattttagttaaatttcctgctgaagctctagtacgataagcaacttgacctaagtgtaaagttgagacttccttcaggtttatatagcttgtgcgccgcttgggtacctcgaatgatagggacttagggtgatagaagtgcaaagcatgactgtcaaatttttggagcaggttttctgacttcggtcggaaaacccctgtttacttggttttaaaaatagcttgcactagcgataccgcgaatatggttattaggtttgttaggcacagtcgtgtcttactatagaaaaataacgtagtgttcattttgctgcctgtatgtgttaatttgtccttattgcgccattgttcttgttaagtcttctgtaaggagttgcgggtttcaaactgtcagtctgagagcataagctcacttttcagtcagttgaattgaatgttacattcgattggttctggatattgatattacccaaggcttgtcctgtttgtaagtcttttcctacacctgacaatatgattatgtttacaatgtccctagaactctgggtgtatcgttcccactgaataaaatttgatctctaagttgacctataaatttaagtaccaaaaaactggtttgtaagattttggaaggcagaggcagggaagagaccaacgtggtctacatataaagtaccaggtacatataaagtaccaggt

SEQ ID NO: 643 - DNA, 1083 bp, synthetic construct
  source 1..1083: mol_type = other DNA
gacaagagaaggactgaactgggggagtgagggaagaatgcgagagtgagactcagagagtaaaggggagggaaaaaaaagaagagagaaagggcgaggaagggggcgaccgcaggagggagacagacctggagtccactcggaggcctggagccgcacaaagcgccaggtcagcggtcccggctgggtgagaccagcaggcggctctagcgcgcgggagctgggcgaggctccgggacgacctcaccaatggagactgcagtatttagcatgccccacccatctgcaaggcattctggatagtgtcaaaacagccggaaatcaagtccgtttatctcaaactttagcattttgggaataaatgatatttgctatgctggttaaattagattttagttaaatttcctgctgaagctctagtacgataagcaacttgacctaagtgtaaagttgagacttccttcaggtttatatagcttgtgcgccgcttgggtacctcgaatgatagggacttagggtgatagaagtgcaaagcatgactgtcaaatttttggagcaggttttctgacttcggtcggaaaacccctatttttgtggtgctaaaagttagattgcattccgcccttctcacgtctctttacgtgttgtttgcgaggcgtggcctcggaggtaaatggtctccttttacctcagataagcttacctttgctctgtgagtaagaatgtagctacacttccaaatttagctattgtcctttgcggtccaaatgaaaatattaccttccgatctaacaatgttaaactagtcccaggcccttctatcgattgccagaatagactagactactacacagacacaccctctcaaatcaggccagctcctgcaacctgcacctacagtttgtcccctgggacaaatgaaaggacaggccctctttcccccccccccccaaatcagagcacacacagatcttggggtctggggcagaaatttcgttcatggaaaaaacaaacaaacaaacaaacacgatcaaaggaagctcgttccctttggcctcagggtttcttagacgccgtgttccc

SEQ ID NO: 644 - DNA, 1084 bp, synthetic construct
  source 1..1084: mol_type = other DNA
gacaagagaaggactgaactgggggagtgagggaagaatgcgagagtgagactcagagagtaaaggggagggaaaaaaaagaagagagaaagggcgaggaagggggcgaccgcaggagggagacagacctggagtccactcggaggcctggagccgcacaaagcgccaggtcagcggtcccggctgggtgagaccagcaggcggctctagcgcgcgggagctgggcgaggctccgggacgacctcaccaatggagactgcagtatttagcatgccccacccatctgcaaggcattctggatagtgtcaaaacagccggaaatcaagtccgtttatctcaaactttagcattttgggaataaatgatatttgctatgctggttaaattagattttagttaaatttcctgctgaagctctagtacgataagcaacttgacctaagtgtaaagttgagacttccttcaggtttatatagcttgtgcgccgcttgggtacctcgaatgatagggacttagggtgatagaagtgcaaagcatgactgtcaaatttttggagcaggttttctgacttcggtcggaaaacccctataactggtaaccaaaagcagattactttcccccttgtggtcttcgcgtttgcggacgggagagaactttcggccattttccttttagaaatttaacttcttgaaggccaccaggtgacccttacttccctctcacctttccttctacctgtactttctctattaaaaagcctgcagaagtacccttgacaaattgccaaaaatgacacctaaaaaaaaaaaaaggaaaaacgacaccttaggtaattataggttgtaagaaaaagatttgacctcttggagtttttatttcttaataccaaaggacacccaaggaacgtatctctcaaaattgggtttcaaacctcagccgtttccttcttagttccagtgcttaacacgcaacagacctgcacaccactacactgcatacgagttttaaagttaataaatcagtcacccctccatagtcttctacctacttgaagacagaaacggctgctaggaagcaattcttc

SEQ ID NO: 645 - DNA, 1087 bp, synthetic construct
  source 1..1087: mol_type = other DNA
gacaagagaaggactgaactgggggagtgagggaagaatgcgagagtgagactcagagagtaaaggggagggaaaaaaaagaagagagaaagggcgaggaagggggcgaccgcaggagggagacagacctggagtccactcggaggcctggagccgcacaaagcgccaggtcagcggtcccggctgggtgagaccagcaggcggctctagcgcgcgggagctgggcgaggctccgggacgacctcaccaatggagactgcagtatttagcatgccccacccatctgcaaggcattctggatagtgtcaaaacagccggaaatcaagtccgtttatctcaaactttagcattttgggaataaatgatatttgctatgctggttaaattagattttagttaaatttcctgctgaagctctagtacgataagcaacttgacctaagtgtaaagttgagacttccttcaggtttatatagcttgtgcgccgcttgggtacctcgaatgatagggacttagggtgatagaagtgcaaagcatgactgtcaaatttttggagcaggttttctgacttcggtcggaaaacccctctggggaataagagtggtttaaagaaagaacaatttgagagatctgcttagatctaataaaacccaagtatagtttctttagacgtcttatatctcacgtaggacctcttatttcagactcactgcaagaacaagctaaagaactatatacagtcaggaacaaggtgagccatcgcggttctcagtcccatgatcttaagagtttttcctcttcccctcttccctggctgtcctggagctcactctgtagaccaggctggtctcaaactcagaaatccacttacctctgcctcccaagggctgggattaaaggcatgcaccaccattgcccggcagggtatgtggactatgctgtccttcaactcagagatcgtggtactttaaatctcattttccgaaagaaaagaaaagaaaggaaggggggaaataaagccagtatattttgcacccacaatctgaagttctacaaatattgttagaaaatgcaaaggacccaagtc

SEQ ID NO: 646 - DNA, 1087 bp, synthetic construct
  source 1..1087: mol_type = other DNA
gacaagagaaggactgaactgggggagtgagggaagaatgcgagagtgagactcagagagtaaaggggagggaaaaaaaagaagagagaaagggcgaggaagggggcgaccgcaggagggagacagacctggagtccactcggaggcctggagccgcacaaagcgccaggtcagcggtcccggctgggtgagaccagcaggcggctctagcgcgcgggagctgggcgaggctccgggacgacctcaccaatggagactgcagtatttagcatgccccacccatctgcaaggcattctggatagtgtcaaaacagccggaaatcaagtccgtttatctcaaactttagcattttgggaataaatgatatttgctatgctggttaaattagattttagttaaatttcctgctgaagctctagtacgataagcaacttgacctaagtgtaaagttgagacttccttcaggtttatatagcttgtgcgccgcttgggtacctcgaatgatagggacttagggtgatagaagtgcaaagcatgactgtcaaatttttggagcaggttttctgacttcggtcggaaaacccctctcggtttatcttaaagggttttaaatatagaaagcttccttagtcttatgggtgagagtgctgtttaagccttacctaggtatgtctttgaacatttattacagattgttatttgtgactatgaccactcaggtgttctgttcttgtgaatttagacacactcagaaaggctacacactcaaagaccacaccaaagtgaagtactatctgggccgtgaaactggtcacatatcagttattttgcagtaaaacaaggaagtcaatcatactgcttcagtgggtcagggagtcaagaatgcacagtacaagagctggtgagattcctcagcaggtaagagcactgaatgctcttccaaagattctgagttcaaatcccagcaaccacgtggtggatttgaacaaaggatgaaaacaaccatccataaccagatctgatgccctcttctggagtgtcaaaagacagctatggtgtacttacataaataaataagtaaaaaca

SEQ ID NO: 647 - DNA, 1087 bp, synthetic construct
  source 1..1087: mol_type = other DNA
gacaagagaaggactgaactgggggagtgagggaagaatgcgagagtgagactcagagagtaaaggggagggaaaaaaaagaagagagaaagggcgaggaagggggcgaccgcaggagggagacagacctggagtccactcggaggcctggagccgcacaaagcgccaggtcagcggtcccggctgggtgagaccagcaggcggctctagcgcgcgggagctgggcgaggctccgggacgacctcaccaatggagactgcagtatttagcatgccccacccatctgcaaggcattctggatagtgtcaaaacagccggaaatcaagtccgtttatctcaaactttagcattttgggaataaatgatatttgctatgctggttaaattagattttagttaaatttcctgctgaagctctagtacgataagcaacttgacctaagtgtaaagttgagacttccttcaggtttatatagcttgtgcgccgcttgggtacctcgaatgatagggacttagggtgatagaagtgcaaagcatgactgtcaaatttttggagcaggttttctgacttcggtcggaaaacccctccacattttgtgtttaaaaatagaaatatttaagtgagatcagtttaaatctgctttatctagggtgtctaactgcttgcatctttttaacttttccttatttgtgagaaggtctgtaaaacttattatatgttagtacactgtagctgtcttcagacactccagaagagggattcagatcaccttacagatggttttgagccaccatgtggttgctgggatttgaactcaggacctttagaaaagtagttgggtgctcttacccgctgagccatctcaccagccctttttttttcttttttccagttcgggtttctctgtgtgtagccctggctgtcctggaactcattctgtagaccgggctggcctcgaactcagaaatctgcctgcctctgcctcccaagtgctgggattaaaggaatgtgccttcattgcccggctctagggctttttgttgttgtttgtttgtttgtttgtttgtttgcttttgtggatggcct

SEQ ID NO: 648 - DNA, 1087 bp, synthetic construct
  source 1..1087: mol_type = other DNA
gacaagagaaggactgaactgggggagtgagggaagaatgcgagagtgagactcagagagtaaaggggagggaaaaaaaagaagagagaaagggcgaggaagggggcgaccgcaggagggagacagacctggagtccactcggaggcctggagccgcacaaagcgccaggtcagcggtcccggctgggtgagaccagcaggcggctctagcgcgcgggagctgggcgaggctccgggacgacctcaccaatggagactgcagtatttagcatgccccacccatctgcaaggcattctggatagtgtcaaaacagccggaaatcaagtccgtttatctcaaactttagcattttgggaataaatgatatttgctatgctggttaaattagattttagttaaatttcctgctgaagctctagtacgataagcaacttgacctaagtgtaaagttgagacttccttcaggtttatatagcttgtgcgccgcttgggtacctcgaatgatagggacttagggtgatagaagtgcaaagcatgactgtcaaatttttggagcaggttttctgacttcggtcggaaaacccctaaaaccagtaagggagaaaggtcaagtaacatataaaggaaggcctatcagaattacaccagacttttcaccagagactatgaaagccagaagagcctggacagatgttatacagacactaagagaacacaaatgccagcccaggctactatacctggccaaactctcaattaccatagatggagaaaccaaagtattccacgacaaaaacaaattcacacaatatctttccacgaatccagcccttcaaaggataatgacagaaaagaagcaatacaaggacggaaatcacgccctagaacaaccaagaaactaatcattcaacaaaccaaaaagaagacagccacaagaacagaatgccaactctaacaacaaaaataaaaggaagcaacaattacttttccttaatatctcttaatatcaatggactcaattccccaataaaaagacatagactaacagactggctacacaaacaggacccaacattctgctgctta

SEQ ID NO: 649 - DNA, 1087 bp, synthetic construct
  source 1..1087: mol_type = other DNA
gacaagagaaggactgaactgggggagtgagggaagaatgcgagagtgagactcagagagtaaaggggagggaaaaaaaagaagagagaaagggcgaggaagggggcgaccgcaggagggagacagacctggagtccactcggaggcctggagccgcacaaagcgccaggtcagcggtcccggctgggtgagaccagcaggcggctctagcgcgcgggagctgggcgaggctccgggacgacctcaccaatggagactgcagtatttagcatgccccacccatctgcaaggcattctggatagtgtcaaaacagccggaaatcaagtccgtttatctcaaactttagcattttgggaataaatgatatttgctatgctggttaaattagattttagttaaatttcctgctgaagctctagtacgataagcaacttgacctaagtgtaaagttgagacttccttcaggtttatatagcttgtgcgccgcttgggtacctcgaatgatagggacttagggtgatagaagtgcaaagcatgactgtcaaatttttggagcaggttttctgacttcggtcggaaaacccctcccaatttcactggtctacaatgaaagcaaaacagttctcttccccgctccccggtgtgtgagaggggctttgatccttctctggtttcctaggaaacgcgtatgtgctagagccacgctctgagacttccgcctcgtgcggtcccgcttcctttctgcctcctctggcctgcatccgtgggggaggtggctggctgcagggttctccggatctcttctgtgttcccactactcaagcaccgagtggcgttctatggcgtccgcctcggctcagcccgcggccctgagcgcggagcaggccaagggtgaggaaagagcctagtctgggtgtgggccgtcttctggggggagggcgcgatactattctttgcctctccaagtggggcccttgcccattagggcgaagggttgggaggacaagcttatcgggttgcttgcaggcctcggcccactaattccctgcctcttccctcctctgggctcgcccgccgtcctccgcg

SEQ ID NO: 650 - DNA, 1087 bp, synthetic construct
  source 1..1087: mol_type = other DNA
gacaagagaaggactgaactgggggagtgagggaagaatgcgagagtgagactcagagagtaaaggggagggaaaaaaaagaagagagaaagggcgaggaagggggcgaccgcaggagggagacagacctggagtccactcggaggcctggagccgcacaaagcgccaggtcagcggtcccggctgggtgagaccagcaggcggctctagcgcgcgggagctgggcgaggctccgggacgacctcaccaatggagactgcagtatttagcatgccccacccatctgcaaggcattctggatagtgtcaaaacagccggaaatcaagtccgtttatctcaaactttagcattttgggaataaatgatatttgctatgctggttaaattagattttagttaaatttcctgctgaagctctagtacgataagcaacttgacctaagtgtaaagttgagacttccttcaggtttatatagcttgtgcgccgcttgggtacctcgaatgatagggacttagggtgatagaagtgcaaagcatgactgtcaaatttttggagcaggttttctgacttcggtcggaaaacccctgaatttgttaaattacaggaggaagcttttttagttcattttacaaatactttcttgttaggtagataataccttctaaggttattatctggatcttctaagtctttttatcgctagcaagtctaagtttctggactttggaattagaagttaatgtcgtaggcgggcatggtggtccacgcctttaatcccagagtttgggaggcagacgcaggtggttttctgagttcgaggccatcctgctcttcaatgttagttccaggacagccagggttatacaaagaaaccctgtctcgagaaacaaaacaaacaaaaaaagagtagctgagtgctctgagttgtctctccagccccttagctatttattttcatttaaattatttttgttttattcgcttgtgtgcctgagtttgaatttcccgggattaacagttgaagactagggctggtgagatggctcagcggttaagattgccgactgctcttccaaaggtcctgag

SEQ ID NO: 651 - DNA, 1087 bp, synthetic construct
  source 1..1087: mol_type = other DNA
gacaagagaaggactgaactgggggagtgagggaagaatgcgagagtgagactcagagagtaaaggggagggaaaaaaaagaagagagaaagggcgaggaagggggcgaccgcaggagggagacagacctggagtccactcggaggcctggagccgcacaaagcgccaggtcagcggtcccggctgggtgagaccagcaggcggctctagcgcgcgggagctgggcgaggctccgggacgacctcaccaatggagactgcagtatttagcatgccccacccatctgcaaggcattctggatagtgtcaaaacagccggaaatcaagtccgtttatctcaaactttagcattttgggaataaatgatatttgctatgctggttaaattagattttagttaaatttcctgctgaagctctagtacgataagcaacttgacctaagtgtaaagttgagacttccttcaggtttatatagcttgtgcgccgcttgggtacctcgaatgatagggacttagggtgatagaagtgcaaagcatgactgtcaaatttttggagcaggttttctgacttcggtcggaaaacccctaccccctaattctacaagaatagaaagcttagcagctcctctgaatggttgctctcaggtgctagtggttgcaagtcgtatgttgatgcctgcctttgccctacctggtgtgtgagcgtgagcgcgccccacctctccagcctctctcttactgtttttcagacaagatgggactgttgttctcctactgctatgtacctcaatttcaattgatcatgcctggacataactgcccatgttgtaaggtcgtctacgttgtaaggtcgtgctcagtttctgatgcctagactagtcacctttccgtttgcctcctgactgtgtaaatgaggcaaatgaaggtggtctcttaactgacatgttagtgtttgacctatgggatagtttctcattgttgagacagaatttctagaagctggtccgctgagcggctaagagcacttgctgatattgcaaaggatctacctgggtttggttctcagcactcacatggaagttcacat

SEQ ID NO: 652 - DNA, 654 bp, synthetic construct
  source 1..654: mol_type = other DNA
gacaagagaaggactgaactgggggagtgagggaagaatgcgagagtgagactcagagagtaaaggggagggaaaaaaaagaagagagaaagggcgaggaagggggcgaccgcaggagggagacagacctggagtccactcggaggcctggagccgcacaaagcgccaggtcagcggtcccggctgggtgagaccagcaggcggctctagcgcgcgggagctgggcgaggctccgggacgacctcaccaatggagactgcagtatttagcatgccccacccatctgcaaggcattctggatagtgtcaaaacagccggaaatcaagtccgtttatctcaaactttagcattttgggaataaatgatatttgctatgctggttaaattagattttagttaaatttcctgctgaagctctagtacgataagcaacttgacctaagtgtaaagttgagacttccttcaggtttatatagcttgtgcgccgcttgggtacctcgaatgatagggacttagggtgatagaagtgcaaagcatgactgtcaaatttttggagcaggttttctgacttcggtcggaaaaccccttgtagttcctgcaatttaattttcgtttaaaactttattttattctttaacttaaaaaaaatatata

SEQ ID NO: 653 - DNA, 533 bp, synthetic construct; identical to SEQ ID NO: 365
  source 1..533: mol_type = other DNA

SEQ ID NO: 654 - DNA, 559 bp, synthetic construct; identical to SEQ ID NO: 366
  source 1..559: mol_type = other DNA

SEQ ID NO: 655 - DNA, 539 bp, synthetic construct; identical to SEQ ID NO: 367
  source 1..539: mol_type = other DNA

SEQ ID NO: 656 - DNA, 533 bp, synthetic construct; identical to SEQ ID NO: 368
  source 1..533: mol_type = other DNA

SEQ ID NO: 657 - DNA, 1087 bp, synthetic construct
  source 1..1087: mol_type = other DNA
cacaagtaatgtacttttaaaattaacctttctataccggttttcacagtgcggctgtttttgttgttcctcttagtgttaattcacactaaagactgtgcatccgactcctacatttatgaaagtaaatgcctattgttagaacaaaaaaggctacagaacaaaaaacaaagcgaaataccatctgctttaggttcagtggtattttcccgctgacagggaggcgggtttttgggtacaggaaacgagtcactatggaggcggtactatgtagatgagaattcaggagcaaactgggaaaagcaactgcttccaaatatttgtgatttttacagtgtagttttggaaaaactcttagcctaccaattcttctaagtgttttaaaatgtgggagccagtacacatgaagttatagagtgttttaatgaggcttaaatatttaccgtaactatgaaatgctacgcatatcatgctgttcaggctccgtggccacgcaactcaatgatagggacttagggtgatagaagtgcaaagcatgactgtcaaatttttggagcaggttttctgacttcggtcggaaaacccctactttctggagtttcaaaaacagactgtacgccaagggtcatatctttttttgtattggtttgtgtcttggttggtgtcttaggtgttaatcctacagtggagggtttatgggaataggaagtaacatgtcgcctgcatgtcataggagaaaaagcgagcatcagccgtatcggctttgtaacacaaattagctatcgtgaagtccgctcagctcttccctttctaccctggctgctttttgcagggattggtccgtggtctccagtctcttgggttctcaccctgtgtgaaaatcttcgtgtttttccctaccccccagtcacctcttacacagcctctgcttccaagcgcagcccccacaggagtttgtaggatttctgtgctagcggggaatgtgttctcacctcatagagccaggtagaaattatgcagatgggcagttctctgggaagaaagcagggcctttggggctctcagtgtccccgttgggttgtagaca

SEQ ID NO: 658 - DNA, 1087 bp, synthetic construct
  source 1..1087: mol_type = other DNA
cacaagtaatgtacttttaaaattaacctttctataccggttttcacagtgcggctgtttttgttgttcctcttagtgttaattcacactaaagactgtgcatccgactcctacatttatgaaagtaaatgcctattgttagaacaaaaaaggctacagaacaaaaaacaaagcgaaataccatctgctttaggttcagtggtattttcccgctgacagggaggcgggtttttgggtacaggaaacgagtcactatggaggcggtactatgtagatgagaattcaggagcaaactgggaaaagcaactgcttccaaatatttgtgatttttacagtgtagttttggaaaaactcttagcctaccaattcttctaagtgttttaaaatgtgggagccagtacacatgaagttatagagtgttttaatgaggcttaaatatttaccgtaactatgaaatgctacgcatatcatgctgttcaggctccgtggccacgcaactcaatgatagggacttagggtgatagaagtgcaaagcatgactgtcaaatttttggagcaggttttctgacttcggtcggaaaacccctactttctggagtttctaaaagtagactgtacgctaagggtcatatctttttttgttttggtttgtgtcttggttggcgtcttaaatgttaatcctacagtggagggctggcgaataggaagtaacatgtcgcctgcacgccataggagaaaaagcgagcatcagccgtatcggctttgtaacacaaattagctatcgtgaagtccgctcagctcttccctttctaccctggctgctttttgcagggattggtccgtggtctccagtctcttgggttctcaccctgtgtgaaaatcttcctgtttttccctaccccccaagtcacctcttacacagcctctgcttccaagcgcagcccccacaggagtttgtaggatttctgtgctagcggggagtgtgttctcacctcatagagccaggtagaaactacgcagatgggtgctgttctccaggaagaaagcagggcctttggggctctcagtgtccccgttgggttgtaga

SEQ ID NO: 659 - DNA, 1087 bp, synthetic construct
  source 1..1087: mol_type = other DNA
cacaagtaatgtacttttaaaattaacctttctataccggttttcacagtgcggctgtttttgttgttcctcttagtgttaattcacactaaagactgtgcatccgactcctacatttatgaaagtaaatgcctattgttagaacaaaaaaggctacagaacaaaaaacaaagcgaaataccatctgctttaggttcagtggtattttcccgctgacagggaggcgggtttttgggtacaggaaacgagtcactatggaggcggtactatgtagatgagaattcaggagcaaactgggaaaagcaactgcttccaaatatttgtgatttttacagtgtagttttggaaaaactcttagcctaccaattcttctaagtgttttaaaatgtgggagccagtacacatgaagttatagagtgttttaatgaggcttaaatatttaccgtaactatgaaatgctacgcatatcatgctgttcaggctccgtggccacgcaactcaatgatagggacttagggtgatagaagtgcaaagcatgactgtcaaatttttggagcaggttttctgacttcggtcggaaaacccctactttctggagtttcaaaaacagaccgtacgccaagggtcatgtcttttttcgtattggtttgtgtcttagttgttaatcctacagtggaggcctggggaataagaagtaacatgtggcctgcacgccataggagaaaaagcgagcatcagccgtatcggctttgtaacacaaattagctatcgtgaagtccgctcagctcttccatttctaccctggctgctttttgcagggattggtccgtggtctccagtctcttgggttctcaccctgtgtgaaaatcttcgtgtttttccctaccccccaagtcacctcttacacagcctctgcttccaagcgcagcccccacaggagtttgtaggatttctgtgctagcggggagtgtgttctcacctcatagagccaggtagaaattatgcagatgggcgctgttctctgggaagaaagcagggcctttggggctctcagtgtccccgttgggttgtagacataacactctta

SEQ ID NO: 660 - DNA, 891 bp, synthetic construct
  source 1..891: mol_type = other DNA
cacaagtaatgtacttttaaaattaacctttctataccggttttcacagtgcggctgtttttgttgttcctcttagtgttaattcacactaaagactgtgcatccgactcctacatttatgaaagtaaatgcctattgttagaacaaaaaaggctacagaacaaaaaacaaagcgaaataccatctgctttaggttcagtggtattttcccgctgacagggaggcgggtttttgggtacaggaaacgagtcactatggaggcggtactatgtagatgagaattcaggagcaaactgggaaaagcaactgcttccaaatatttgtgatttttacagtgtagttttggaaaaactcttagcctaccaattcttctaagtgttttaaaatgtgggagccagtacacatgaagttatagagtgttttaatgaggcttaaatatttaccgtaactatgaaatgctacgcatatcatgctgttcaggctccgtggccacgcaactcaatgatagggacttagggtgatagaagtgcaaagcatgactgtcaaatttttggagcaggttttctgacttcggtcggaaaacccctcctccggggatacaacgtgtttcctaaaagtagagggaggtaagagacggtagcacctgcggggcggcttgcacgccgagtgcctgtgacgcgccggcttaacttaactgcttccctgaagtaccttgaggttcctgatgtgcgggcggtagacggtaggcttatgcggcacgctgtcgtttccaccgtggctactgcgctttgggaaggccacgacctcctcctttggggaggtccttaggatctcagcttggcagtcgagtgggtggcgaccttttaaaggaatgggacccacccggagttc

SEQ ID NO: 661 - DNA, 1079 bp, synthetic construct
  source 1..1079: mol_type = other DNA
cacaagtaatgtacttttaaaattaacctttctataccggttttcacagtgcggctgtttttgttgttcctcttagtgttaattcacactaaagactgtgcatccgactcctacatttatgaaagtaaatgcctattgttagaacaaaaaaggctacagaacaaaaaacaaagcgaaataccatctgctttaggttcagtggtattttcccgctgacagggaggcgggtttttgggtacaggaaacgagtcactatggaggcggtactatgtagatgagaattcaggagcaaactgggaaaagcaactgcttccaaatatttgtgatttttacagtgtagttttggaaaaactcttagcctaccaattcttctaagtgttttaaaatgtgggagccagtacacatgaagttatagagtgttttaatgaggcttaaatatttaccgtaactatgaaatgctacgcatatcatgctgttcaggctccgtggccacgcaactcaatgatagggacttagggtgatagaagtgcaaagcatgactgtcaaatttttggagcaggttttctgacttcggtcggaaaacccctttcccttcttgtaatacaaaataataacaaccacagaggacatcgcaagtaaaatgtgtataacaaccccatctaaagaaccctatcatctttctactatctgtctacctaaatatgtatagtataaataaccctatatagcactctaagcaacttaagttaggtaacttagaaaactcttttttttttttgagactgagtctcactctgtcgcacccaggctggagtgcagtggcgtgatctcggctcactgcaacctccaccttctgggttcaagtgattctcccatctcagtctcccaagtagctgggattacaggcacgccaccatgccctgctacatttttttttttttagtagagatgaggtttcaccacattggccaggctgttctcgaactcctgacctcaggtgatccgcccaccttggcctcatgaagtgctgggattacaggtgtgagccactgtacccagccagaaaactcttaaaaaac

SEQ ID NO: 662 - DNA, 969 bp, synthetic construct
  source 1..969: mol_type = other DNA
cacaagtaatgtacttttaaaattaacctttctataccggttttcacagtgcggctgtttttgttgttcctcttagtgttaattcacactaaagactgtgcatccgactcctacatttatgaaagtaaatgcctattgttagaacaaaaaaggctacagaacaaaaaacaaagcgaaataccatctgctttaggttcagtggtattttcccgctgacagggaggcgggtttttgggtacaggaaacgagtcactatggaggcggtactatgtagatgagaattcaggagcaaactgggaaaagcaactgcttccaaatatttgtgatttttacagtgtagttttggaaaaactcttagcctaccaattcttctaagtgttttaaaatgtgggagccagtacacatgaagttatagagtgttttaatgaggcttaaatatttaccgtaactatgaaatgctacgcatatcatgctgttcaggctccgtggccacgcaactcaatgatagggacttagggtgatagaagtgcaaagcatgactgtcaaatttttggagcaggttttctgacttcggtcggaaaacccctctgaattttcttgcagttgaacaacagaggctttttttgtgtgtgtgggggtgcttggttttgggaggttgaagagtacttgttcgcaaactctctaaatgagagatggggaagtgtcttaccagctgattcgcgagagcacctgcaagtttacctgttttagtgatttgcgtttatgaaagttggagttgctgattttgtgatctctacttttaaggtaaaagcagggcggtgttgacttttcttgccagttggctgtcctgttttctttctcgcactgttttctttttgagacgaagtctgtcgctcaggctggagtgcactggcgtgatctcggctcgctgcaaactttgccgaacccctgtttagcgatttccgtttg

SEQ ID NO: 663 - DNA, 1087 bp, synthetic construct
  source 1..1087: mol_type = other DNA
cacaagtaatgtacttttaaaattaacctttctataccggttttcacagtgcggctgtttttgttgttcctcttagtgttaattcacactaaagactgtgcatccgactcctacatttatgaaagtaaatgcctattgttagaacaaaaaaggctacagaacaaaaaacaaagcgaaataccatctgctttaggttcagtggtattttcccgctgacagggaggcgggtttttgggtacaggaaacgagtcactatggaggcggtactatgtagatgagaattcaggagcaaactgggaaaagcaactgcttccaaatatttgtgatttttacagtgtagttttggaaaaactcttagcctaccaattcttctaagtgttttaaaatgtgggagccagtacacatgaagttatagagtgttttaatgaggcttaaatatttaccgtaactatgaaatgctacgcatatcatgctgttcaggctccgtggccacgcaactcaatgatagggacttagggtgatagaagtgcaaagcatgactgtcaaatttttggagcaggttttctgacttcggtcggaaaacccctatatgtggtaatccaacaatagaaattatttttaagtttgtgtgttcctttttctgttcaatggtgcttttgatattgttgtaaagcagtgactagcagattctgtgtggtaaaagcactgaaccctgtttagttcttttctccctaccttattggtaattatttctgtgtatatatgttccaaagaaatgcggcttgtatattcatgcttttcaactttttgtgatagacagttgatacacaagtagtacctcctccgggatcttcttagtcaagactgtttggtagatgcatgttttttgttacttgtaatgtacagtattcagttcattttctttttgcagcactgtccggttgaaacacaacgcgaggatcgggcgtggtggctcacgcctgtaatcccagcactttgggaggccgaggcaggacaatcaagaccaatcctggtcatcaaggcaggagaatcaagaccatcgaggtcaggagatcaagaccatcct

SEQ ID NO: 664 - DNA, 1085 bp, synthetic construct
  source 1..1085: mol_type = other DNA
cacaagtaatgtacttttaaaattaacctttctataccggttttcacagtgcggctgtttttgttgttcctcttagtgttaattcacactaaagactgtgcatccgactcctacatttatgaaagtaaatgcctattgttagaacaaaaaaggctacagaacaaaaaacaaagcgaaataccatctgctttaggttcagtggtattttcccgctgacagggaggcgggtttttgggtacaggaaacgagtcactatggaggcggtactatgtagatgagaattcaggagcaaactgggaaaagcaactgcttccaaatatttgtgatttttacagtgtagttttggaaaaactcttagcctaccaattcttctaagtgttttaaaatgtgggagccagtacacatgaagttatagagtgttttaatgaggcttaaatatttaccgtaactatgaaatgctacgcatatcatgctgttcaggctccgtggccacgcaactcaatgatagggacttagggtgatagaagtgcaaagcatgactgtcaaatttttggagcaggttttctgacttcggtcggaaaacccctacatcaggttgtttttctgtttttacatcaggttgtttttctgtttggttttttttttacaccacgtttatacgccggtgcacggtttaccactgaaaacacctttcatctacaggtgatatcttttaacacaaataaaatgtagtagtcctaggagacggaatagaaggaggtggggcctaggcagattcatctctgcggtgcattttgcctctggccctcgggccctagtttgcgatctttcccatcttgcctctgcttccctctgcacaatcctgagtattgcagtaccttacacttaaggaaatttcgtcttgccaaagttgatccatttcagctccgaaacataacaggaactagtgcaacgataaacgtatgaggaacttgcaataagagtgacagaatcctttgaatcaaaaaaaaaaaaagccaccacttaatgagtatctaccatatgtcaagggcttcaccaatatttcattgaaatattccagacca

SEQ ID NO: 665 - DNA, 1087 bp, synthetic construct
  source 1..1087: mol_type = other DNA
cacaagtaatgtacttttaaaattaacctttctataccggttttcacagtgcggctgtttttgttgttcctcttagtgttaattcacactaaagactgtgcatccgactcctacatttatgaaagtaaatgcctattgttagaacaaaaaaggctacagaacaaaaaacaaagcgaaataccatctgctttaggttcagtggtattttcccgctgacagggaggcgggtttttgggtacaggaaacgagtcactatggaggcggtactatgtagatgagaattcaggagcaaactgggaaaagcaactgcttccaaatatttgtgatttttacagtgtagttttggaaaaactcttagcctaccaattcttctaagtgttttaaaatgtgggagccagtacacatgaagttatagagtgttttaatgaggcttaaatatttaccgtaactatgaaatgctacgcatatcatgctgttcaggctccgtggccacgcaactcaatgatagggacttagggtgatagaagtgcaaagcatgactgtcaaatttttggagcaggttttctgacttcggtcggaaaacccctcttatgatgtttgttgccaatgatagattgttttcactgtgcaaaaattatgggtagttttggtggtcttgatgcagttgtaagcttggggtatgaaggtttgggccacgcctgggcgcttccggctgcgccggatgctgtttcctttccgctcccaggggcgttgggaacggttgtaggacgtggctctttattcgtgagttttccatttacctccgctgaacctagagcttcagacgccctatggcgtccgcctcgacccaaccggcggccttgagcgctgagcaagcaaagggtgagaatcgtcctagtcaaggcataggctgctggcctggggtagtcaaggcatgggctgctggtctggggaggatgcgggcggaggatgtggggcgacaaacctggctacgtccgccgggaaaatggggtaggggacgccgggtaccgtccttctaagtggggcgcttgcccccaagacttgggatcttattgggttacctaca

SEQ ID NO: 666 - DNA, 1085 bp, synthetic construct
  source 1..1085: mol_type = other DNA
cacaagtaatgtacttttaaaattaacctttctataccggttttcacagtgcggctgtttttgttgttcctcttagtgttaattcacactaaagactgtgcatccgactcctacatttatgaaagtaaatgcctattgttagaacaaaaaaggctacagaacaaaaaacaaagcgaaataccatctgctttaggttcagtggtattttcccgctgacagggaggcgggtttttgggtacaggaaacgagtcactatggaggcggtactatgtagatgagaattcaggagcaaactgggaaaagcaactgcttccaaatatttgtgatttttacagtgtagttttggaaaaactcttagcctaccaattcttctaagtgttttaaaatgtgggagccagtacacatgaagttatagagtgttttaatgaggcttaaatatttaccgtaactatgaaatgctacgcatatcatgctgttcaggctccgtggccacgcaactcaatgatagggacttagggtgatagaagtgcaaagcatgactgtcaaatttttggagcaggttttctgacttcggtcggaaaaccccttctttactgttatatgttaggcgaaatattacgcgtttggagtaagtggtgctttttgtaactgaaaagagattctgtgtgtgtttttttttttttagaggctgcatagttatttgtatgaaccgcaggtgacctaattagcaaggtaattcagacctgtatcctagcacttaagaagtggaagtgggataaccctgcgtgttctcgtgtgggaggctagcttaagcaacaaagcaggaaggccccaccaacaaaagaatttaaaaattatacgtgcgtggtggcgcgcgtatgaggaaattatttggcaactgtgttacagtatagcagcaaatggaatagacctagtccctgactttaggagacctgcctcagccccccgaatggctgggactacaggcgtgcgcctccgcgcccagctaatttttgcatttttggtagagacgggttcaccatgttggccaggatggtctccatctcttcatctggtgatccgcc

SEQ ID NO: 667 - DNA, 1087 bp, synthetic construct
  source 1..1087: mol_type = other DNA
cacaagtaatgtacttttaaaattaacctttctataccggttttcacagtgcggctgtttttgttgttcctcttagtgttaattcacactaaagactgtgcatccgactcctacatttatgaaagtaaatgcctattgttagaacaaaaaaggctacagaacaaaaaacaaagcgaaataccatctgctttaggttcagtggtattttcccgctgacagggaggcgggtttttgggtacaggaaacgagtcactatggaggcggtactatgtagatgagaattcaggagcaaactgggaaaagcaactgcttccaaatatttgtgatttttacagtgtagttttggaaaaactcttagcctaccaattcttctaagtgttttaaaatgtgggagccagtacacatgaagttatagagtgttttaatgaggcttaaatatttaccgtaactatgaaatgctacgcatatcatgctgttcaggctccgtggccacgcaactcaatgatagggacttagggtgatagaagtgcaaagcatgactgtcaaatttttggagcaggttttctgacttcggtcggaaaacccctaccttattcacgcctaaaaagtagactgactgtggggtggtcgtgttttttgtttcttgttggtaggtggtgaatgcgtttttttcgttgttttctccgttactcaggctgccagttgcttggcagtcttgtcgctggctgtggacgctctgcacttcatcaccgtccccagctgcgctttgagccggtctaaggttgcccacagtattgacgttgggacccacgaaactggcaatttccatgtgtgcggccttacccagttctcccaaacttctgcgtataaccgcttctctgtgcttcagaaagataagtccggccccggcctcacacagcagctcagttcgtgacagcgtttaatatgtaaaatggagcaaataatttatagggcgttgggagagttaaagagactaattcatttacgtgttaaatacagggaatggcttttgcattgatataaccccagcctccagcatgcgccagacctgacgtaggtgttcggc

SEQ ID NO: 668 - DNA, 1087 bp, synthetic construct
  source 1..1087: mol_type = other DNA
cacaagtaatgtacttttaaaattaacctttctataccggttttcacagtgcggctgtttttgttgttcctcttagtgttaattcacactaaagactgtgcatccgactcctacatttatgaaagtaaatgcctattgttagaacaaaaaaggctacagaacaaaaaacaaagcgaaataccatctgctttaggttcagtggtattttcccgctgacagggaggcgggtttttgggtacaggaaacgagtcactatggaggcggtactatgtagatgagaattcaggagcaaactgggaaaagcaactgcttccaaatatttgtgatttttacagtgtagttttggaaaaactcttagcctaccaattcttctaagtgttttaaaatgtgggagccagtacacatgaagttatagagtgttttaatgaggcttaaatatttaccgtaactatgaaatgctacgcatatcatgctgttcaggctccgtggccacgcaactcaatgatagggacttagggtgatagaagtgcaaagcatgactgtcaaatttttggagcaggttttctgacttcggtcggaaaaccccttttgacccattacccatctaagttagatgcttttttaaatgttttttaatttttaaatttttaatttttttcattatttattttttatttttgagacggatctcggctcactgtaacctccacctcccgggttcaagcgattctcctgactcagcctcccgagtagctgggattacaggcgcgcgccaccatgcccggctaatttttctatttttagtaaagacggggtttcgccatgttgaccagggtggtcttgaactcctgacgtcaggtgatcctcctgcctcgtgctgggattgcaggcgtgagccaccgctcccggcccttagatgctttttaatcagcaagtacgcaatgctttcctgacaggaatgtcaagtccgtcaggaaatccacataagggtgttaagcaggcaaagtaccacatacagattaaaatcaaaagcactgtcaacgcttatttaatttatacagtagaccctaacttttctaattttgtg

SEQ ID NO: 669 - DNA, 1087 bp, synthetic construct
  source 1..1087: mol_type = other DNA
cacaagtaatgtacttttaaaattaacctttctataccggttttcacagtgcggctgtttttgttgttcctcttagtgttaattcacactaaagactgtgcatccgactcctacatttatgaaagtaaatgcctattgttagaacaaaaaaggctacagaacaaaaaacaaagcgaaataccatctgctttaggttcagtggtattttcccgctgacagggaggcgggtttttgggtacaggaaacgagtcactatggaggcggtactatgtagatgagaattcaggagcaaactgggaaaagcaactgcttccaaatatttgtgatttttacagtgtagttttggaaaaactcttagcctaccaattcttctaagtgttttaaaatgtgggagccagtacacatgaagttatagagtgttttaatgaggcttaaatatttaccgtaactatgaaatgctacgcatatcatgctgttcaggctccgtggccacgcaactcaatgatagggacttagggtgatagaagtgcaaagcatgactgtcaaatttttggagcaggttttctgacttcggtcggaaaacccctgtttacttggttttaaaaatagcttgcactagcgataccgcgaatatggttattaggtttgttaggcacagtcgtgtcttactatagaaaaataacgtagtgttcattttgctgcctgtatgtgttaatttgtccttattgcgccattgttcttgttaagtcttctgtaaggagttgcgggtttcaaactgtcagtctgagagcataagctcacttttcagtcagttgaattgaatgttacattcgattggttctggatattgatattacccaaggcttgtcctgtttgtaagtcttttcctacacctgacaatatgattatgtttacaatgtccctagaactctgggtgtatcgttcccactgaataaaatttgatctctaagttgacctataaatttaagtaccaaaaaactggtttgtaagattttggaaggcagaggcagggaagagaccaacgtggtctacatataaagtaccaggtacatataaagtaccaggt

SEQ ID NO: 670 - DNA, 1083 bp, synthetic construct
  source 1..1083: mol_type = other DNA
cacaagtaatgtacttttaaaattaacctttctataccggttttcacagtgcggctgtttttgttgttcctcttagtgttaattcacactaaagactgtgcatccgactcctacatttatgaaagtaaatgcctattgttagaacaaaaaaggctacagaacaaaaaacaaagcgaaataccatctgctttaggttcagtggtattttcccgctgacagggaggcgggtttttgggtacaggaaacgagtcactatggaggcggtactatgtagatgagaattcaggagcaaactgggaaaagcaactgcttccaaatatttgtgatttttacagtgtagttttggaaaaactcttagcctaccaattcttctaagtgttttaaaatgtgggagccagtacacatgaagttatagagtgttttaatgaggcttaaatatttaccgtaactatgaaatgctacgcatatcatgctgttcaggctccgtggccacgcaactcaatgatagggacttagggtgatagaagtgcaaagcatgactgtcaaatttttggagcaggttttctgacttcggtcggaaaacccctatttttgtggtgctaaaagttagattgcattccgcccttctcacgtctctttacgtgttgtttgcgaggcgtggcctcggaggtaaatggtctccttttacctcagataagcttacctttgctctgtgagtaagaatgtagctacacttccaaatttagctattgtcctttgcggtccaaatgaaaatattaccttccgatctaacaatgttaaactagtcccaggcccttctatcgattgccagaatagactagactactacacagacacaccctctcaaatcaggccagctcctgcaacctgcacctacagtttgtcccctgggacaaatgaaaggacaggccctctttcccccccccccccaaatcagagcacacacagatcttggggtctggggcagaaatttcgttcatggaaaaaacaaacaaacaaacaaacacgatcaaaggaagctcgttccctttggcctcagggtttcttagacgccgtgttccc

SEQ ID NO: 671 - DNA, 1084 bp, synthetic construct
  source 1..1084: mol_type = other DNA
cacaagtaatgtacttttaaaattaacctttctataccggttttcacagtgcggctgtttttgttgttcctcttagtgttaattcacactaaagactgtgcatccgactcctacatttatgaaagtaaatgcctattgttagaacaaaaaaggctacagaacaaaaaacaaagcgaaataccatctgctttaggttcagtggtattttcccgctgacagggaggcgggtttttgggtacaggaaacgagtcactatggaggcggtactatgtagatgagaattcaggagcaaactgggaaaagcaactgcttccaaatatttgtgatttttacagtgtagttttggaaaaactcttagcctaccaattcttctaagtgttttaaaatgtgggagccagtacacatgaagttatagagtgttttaatgaggcttaaatatttaccgtaactatgaaatgctacgcatatcatgctgttcaggctccgtggccacgcaactcaatgatagggacttagggtgatagaagtgcaaagcatgactgtcaaatttttggagcaggttttctgacttcggtcggaaaacccctataactggtaaccaaaagcagattactttcccccttgtggtcttcgcgtttgcggacgggagagaactttcggccattttccttttagaaatttaacttcttgaaggccaccaggtgacccttacttccctctcacctttccttctacctgtactttctctattaaaaagcctgcagaagtacccttgacaaattgccaaaaatgacacctaaaaaaaaaaaaaggaaaaacgacaccttaggtaattataggttgtaagaaaaagatttgacctcttggagtttttatttcttaataccaaaggacacccaaggaacgtatctctcaaaattgggtttcaaacctcagccgtttccttcttagttccagtgcttaacacgcaacagacctgcacaccactacactgcatacgagttttaaagttaataaatcagtcacccctccatagtcttctacctacttgaagacagaaacggctgctaggaagcaattcttc

SEQ ID NO: 672 - DNA, 1087 bp, synthetic construct
  source 1..1087: mol_type = other DNA
cacaagtaatgtacttttaaaattaacctttctataccggttttcacagtgcggctgtttttgttgttcctcttagtgttaattcacactaaagactgtgcatccgactcctacatttatgaaagtaaatgcctattgttagaacaaaaaaggctacagaacaaaaaacaaagcgaaataccatctgctttaggttcagtggtattttcccgctgacagggaggcgggtttttgggtacaggaaacgagtcactatggaggcggtactatgtagatgagaattcaggagcaaactgggaaaagcaactgcttccaaatatttgtgatttttacagtgtagttttggaaaaactcttagcctaccaattcttctaagtgttttaaaatgtgggagccagtacacatgaagttatagagtgttttaatgaggcttaaatatttaccgtaactatgaaatgctacgcatatcatgctgttcaggctccgtggccacgcaactcaatgatagggacttagggtgatagaagtgcaaagcatgactgtcaaatttttggagcaggttttctgacttcggtcggaaaacccctctggggaataagagtggtttaaagaaagaacaatttgagagatctgcttagatctaataaaacccaagtatagtttctttagacgtcttatatctcacgtaggacctcttatttcagactcactgcaagaacaagctaaagaactatatacagtcaggaacaaggtgagccatcgcggttctcagtcccatgatcttaagagtttttcctcttcccctcttccctggctgtcctggagctcactctgtagaccaggctggtctcaaactcagaaatccacttacctctgcctcccaagggctgggattaaaggcatgcaccaccattgcccggcagggtatgtggactatgctgtccttcaactcagagatcgtggtactttaaatctcattttccgaaagaaaagaaaagaaaggaaggggggaaataaagccagtatattttgcacccacaatctgaagttctacaaatattgttagaaaatgcaaaggacccaagtc

SEQ ID NO: 673 - DNA, 1087 bp, synthetic construct
  source 1..1087: mol_type = other DNA
cacaagtaatgtacttttaaaattaacctttctataccggttttcacagtgcggctgtttttgttgttcctcttagtgttaattcacactaaagactgtgcatccgactcctacatttatgaaagtaaatgcctattgttagaacaaaaaaggctacagaacaaaaaacaaagcgaaataccatctgctttaggttcagtggtattttcccgctgacagggaggcgggtttttgggtacaggaaacgagtcactatggaggcggtactatgtagatgagaattcaggagcaaactgggaaaagcaactgcttccaaatatttgtgatttttacagtgtagttttggaaaaactcttagcctaccaattcttctaagtgttttaaaatgtgggagccagtacacatgaagttatagagtgttttaatgaggcttaaatatttaccgtaactatgaaatgctacgcatatcatgctgttcaggctccgtggccacgcaactcaatgatagggacttagggtgatagaagtgcaaagcatgactgtcaaatttttggagcaggttttctgacttcggtcggaaaacccctctcggtttatcttaaagggttttaaatatagaaagcttccttagtcttatgggtgagagtgctgtttaagccttacctaggtatgtctttgaacatttattacagattgttatttgtgactatgaccactcaggtgttctgttcttgtgaatttagacacactcagaaaggctacacactcaaagaccacaccaaagtgaagtactatctgggccgtgaaactggtcacatatcagttattttgcagtaaaacaaggaagtcaatcatactgcttcagtgggtcagggagtcaagaatgcacagtacaagagctggtgagattcctcagcaggtaagagcactgaatgctcttccaaagattctgagttcaaatcccagcaaccacgtggtggatttgaacaaaggatgaaaacaaccatccataaccagatctgatgccctcttctggagtgtcaaaagacagctatggtgtacttacataaataaataagtaaaaaca

SEQ ID NO: 674 - DNA, 1087 bp, synthetic construct
  source 1..1087: mol_type = other DNA
cacaagtaatgtacttttaaaattaacctttctataccggttttcacagtgcggctgtttttgttgttcctcttagtgttaattcacactaaagactgtgcatccgactcctacatttatgaaagtaaatgcctattgttagaacaaaaaaggctacagaacaaaaaacaaagcgaaataccatctgctttaggttcagtggtattttcccgctgacagggaggcgggtttttgggtacaggaaacgagtcactatggaggcggtactatgtagatgagaattcaggagcaaactgggaaaagcaactgcttccaaatatttgtgatttttacagtgtagttttggaaaaactcttagcctaccaattcttctaagtgttttaaaatgtgggagccagtacacatgaagttatagagtgttttaatgaggcttaaatatttaccgtaactatgaaatgctacgcatatcatgctgttcaggctccgtggccacgcaactcaatgatagggacttagggtgatagaagtgcaaagcatgactgtcaaatttttggagcaggttttctgacttcggtcggaaaacccctccacattttgtgtttaaaaatagaaatatttaagtgagatcagtttaaatctgctttatctagggtgtctaactgcttgcatctttttaacttttccttatttgtgagaaggtctgtaaaacttattatatgttagtacactgtagctgtcttcagacactccagaagagggattcagatcaccttacagatggttttgagccaccatgtggttgctgggatttgaactcaggacctttagaaaagtagttgggtgctcttacccgctgagccatctcaccagccctttttttttcttttttccagttcgggtttctctgtgtgtagccctggctgtcctggaactcattctgtagaccgggctggcctcgaactcagaaatctgcctgcctctgcctcccaagtgctgggattaaaggaatgtgccttcattgcccggctctagggctttttgttgttgtttgtttgtttgtttgtttgtttgcttttgtggatggcct

SEQ ID NO: 675 - DNA, 1087 bp, synthetic construct
  source 1..1087: mol_type = other DNA
cacaagtaatgtacttttaaaattaacctttctataccggttttcacagtgcggctgtttttgttgttcctcttagtgttaattcacactaaagactgtgcatccgactcctacatttatgaaagtaaatgcctattgttagaacaaaaaaggctacagaacaaaaaacaaagcgaaataccatctgctttaggttcagtggtattttcccgctgacagggaggcgggtttttgggtacaggaaacgagtcactatggaggcggtactatgtagatgagaattcaggagcaaactgggaaaagcaactgcttccaaatatttgtgatttttacagtgtagttttggaaaaactcttagcctaccaattcttctaagtgttttaaaatgtgggagccagtacacatgaagttatagagtgttttaatgaggcttaaatatttaccgtaactatgaaatgctacgcatatcatgctgttcaggctccgtggccacgcaactcaatgatagggacttagggtgatagaagtgcaaagcatgactgtcaaatttttggagcaggttttctgacttcggtcggaaaacccctaaaaccagtaagggagaaaggtcaagtaacatataaaggaaggcctatcagaattacaccagacttttcaccagagactatgaaagccagaagagcctggacagatgttatacagacactaagagaacacaaatgccagcccaggctactatacctggccaaactctcaattaccatagatggagaaaccaaagtattccacgacaaaaacaaattcacacaatatctttccacgaatccagcccttcaaaggataatgacagaaaagaagcaatacaaggacggaaatcacgccctagaacaaccaagaaactaatcattcaacaaaccaaaaagaagacagccacaagaacagaatgccaactctaacaacaaaaataaaaggaagcaacaattacttttccttaatatctcttaatatcaatggactcaattccccaataaaaagacatagactaacagactggctacacaaacaggacccaacattctgctgctta

SEQ ID NO: 676 - DNA, 1087 bp, synthetic construct
  source 1..1087: mol_type = other DNA
cacaagtaatgtacttttaaaattaacctttctataccggttttcacagtgcggctgtttttgttgttcctcttagtgttaattcacactaaagactgtgcatccgactcctacatttatgaaagtaaatgcctattgttagaacaaaaaaggctacagaacaaaaaacaaagcgaaataccatctgctttaggttcagtggtattttcccgctgacagggaggcgggtttttgggtacaggaaacgagtcactatggaggcggtactatgtagatgagaattcaggagcaaactgggaaaagcaactgcttccaaatatttgtgatttttacagtgtagttttggaaaaactcttagcctaccaattcttctaagtgttttaaaatgtgggagccagtacacatgaagttatagagtgttttaatgaggcttaaatatttaccgtaactatgaaatgctacgcatatcatgctgttcaggctccgtggccacgcaactcaatgatagggacttagggtgatagaagtgcaaagcatgactgtcaaatttttggagcaggttttctgacttcggtcggaaaacccctcccaatttcactggtctacaatgaaagcaaaacagttctcttccccgctccccggtgtgtgagaggggctttgatccttctctggtttcctaggaaacgcgtatgtgctagagccacgctctgagacttccgcctcgtgcggtcccgcttcctttctgcctcctctggcctgcatccgtgggggaggtggctggctgcagggttctccggatctcttctgtgttcccactactcaagcaccgagtggcgttctatggcgtccgcctcggctcagcccgcggccctgagcgcggagcaggccaagggtgaggaaagagcctagtctgggtgtgggccgtcttctggggggagggcgcgatactattctttgcctctccaagtggggcccttgcccattagggcgaagggttgggaggacaagcttatcgggttgcttgcaggcctcggcccactaattccctgcctcttccctcctctgggctcgcccgccgtcctccgcg

SEQ ID NO: 677 - DNA, 1087 bp, synthetic construct
  source 1..1087: mol_type = other DNA
cacaagtaatgtacttttaaaattaacctttctataccggttttcacagtgcggctgtttttgttgttcctcttagtgttaattcacactaaagactgtgcatccgactcctacatttatgaaagtaaatgcctattgttagaacaaaaaaggctacagaacaaaaaacaaagcgaaataccatctgctttaggttcagtggtattttcccgctgacagggaggcgggtttttgggtacaggaaacgagtcactatggaggcggtactatgtagatgagaattcaggagcaaactgggaaaagcaactgcttccaaatatttgtgatttttacagtgtagttttggaaaaactcttagcctaccaattcttctaagtgttttaaaatgtgggagccagtacacatgaagttatagagtgttttaatgaggcttaaatatttaccgtaactatgaaatgctacgcatatcatgctgttcaggctccgtggccacgcaactcaatgatagggacttagggtgatagaagtgcaaagcatgactgtcaaatttttggagcaggttttctgacttcggtcggaaaacccctgaatttgttaaattacaggaggaagcttttttagttcattttacaaatactttcttgttaggtagataataccttctaaggttattatctggatcttctaagtctttttatcgctagcaagtctaagtttctggactttggaattagaagttaatgtcgtaggcgggcatggtggtccacgcctttaatcccagagtttgggaggcagacgcaggtggttttctgagttcgaggccatcctgctcttcaatgttagttccaggacagccagggttatacaaagaaaccctgtctcgagaaacaaaacaaacaaaaaaagagtagctgagtgctctgagttgtctctccagccccttagctatttattttcatttaaattatttttgttttattcgcttgtgtgcctgagtttgaatttcccgggattaacagttgaagactagggctggtgagatggctcagcggttaagattgccgactgctcttccaaaggtcctgag

SEQ ID NO: 678 - DNA, 1087 bp, synthetic construct
  source 1..1087: mol_type = other DNA
cacaagtaatgtacttttaaaattaacctttctataccggttttcacagtgcggctgtttttgttgttcctcttagtgttaattcacactaaagactgtgcatccgactcctacatttatgaaagtaaatgcctattgttagaacaaaaaaggctacagaacaaaaaacaaagcgaaataccatctgctttaggttcagtggtattttcccgctgacagggaggcgggtttttgggtacaggaaacgagtcactatggaggcggtactatgtagatgagaattcaggagcaaactgggaaaagcaactgcttccaaatatttgtgatttttacagtgtagttttggaaaaactcttagcctaccaattcttctaagtgttttaaaatgtgggagccagtacacatgaagttatagagtgttttaatgaggcttaaatatttaccgtaactatgaaatgctacgcatatcatgctgttcaggctccgtggccacgcaactcaatgatagggacttagggtgatagaagtgcaaagcatgactgtcaaatttttggagcaggttttctgacttcggtcggaaaacccctaccccctaattctacaagaatagaaagcttagcagctcctctgaatggttgctctcaggtgctagtggttgcaagtcgtatgttgatgcctgcctttgccctacctggtgtgtgagcgtgagcgcgccccacctctccagcctctctcttactgtttttcagacaagatgggactgttgttctcctactgctatgtacctcaatttcaattgatcatgcctggacataactgcccatgttgtaaggtcgtctacgttgtaaggtcgtgctcagtttctgatgcctagactagtcacctttccgtttgcctcctgactgtgtaaatgaggcaaatgaaggtggtctcttaactgacatgttagtgtttgacctatgggatagtttctcattgttgagacagaatttctagaagctggtccgctgagcggctaagagcacttgctgatattgcaaaggatctacctgggtttggttctcagcactcacatggaagttcacat

SEQ ID NO: 679 - DNA, 654 bp, synthetic construct
  source 1..654: mol_type = other DNA
cacaagtaatgtacttttaaaattaacctttctataccggttttcacagtgcggctgtttttgttgttcctcttagtgttaattcacactaaagactgtgcatccgactcctacatttatgaaagtaaatgcctattgttagaacaaaaaaggctacagaacaaaaaacaaagcgaaataccatctgctttaggttcagtggtattttcccgctgacagggaggcgggtttttgggtacaggaaacgagtcactatggaggcggtactatgtagatgagaattcaggagcaaactgggaaaagcaactgcttccaaatatttgtgatttttacagtgtagttttggaaaaactcttagcctaccaattcttctaagtgttttaaaatgtgggagccagtacacatgaagttatagagtgttttaatgaggcttaaatatttaccgtaactatgaaatgctacgcatatcatgctgttcaggctccgtggccacgcaactcaatgatagggacttagggtgatagaagtgcaaagcatgactgtcaaatttttggagcaggttttctgacttcggtcggaaaaccccttgtagttcctgcaatttaattttcgtttaaaactttattttattctttaacttaaaaaaaatatata

SEQ ID NO: 680 - DNA, 1087 bp, synthetic construct
  source 1..1087: mol_type = other DNA
agtccttgctcttaactactgaaccaactctcccgtcctataagtaaattttcagagcactaatctattctacttcaagtttctcctgcatcagatccaggccagctggagcgagctacacggttaccccccctcctcccaaaggggaaaataaggatcaggtgaaaatgtttggaaattacaatagtagaatataaagaaagaatatgaaggcggccatgaaggggtagaaaggtagatgaccaggcgtcatccctgatgtcacgggtatgggcgtggtgtatgcagataagcgcgcagggtctgccgggtccgcgctccgtgcagaaatgtgaggggtttctcccgcggcgagggagggagcgcggatacgcgggtgtcagcagagcgcaagaatgtcgtgtgcgacgagggagacccgagatcggccagggctaagtgaccgtgtgttaagagtgtagaggcgacgggtgtgagccggggccgggcagtgggaaagcaatgatagggacttagggtgatagaagtgcaaagcatgactgtcaaatttttggagcaggttttctgacttcggtcggaaaacccctactttctggagtttcaaaaacagactgtacgccaagggtcatatctttttttgtattggtttgtgtcttggttggtgtcttaggtgttaatcctacagtggagggtttatgggaataggaagtaacatgtcgcctgcatgtcataggagaaaaagcgagcatcagccgtatcggctttgtaacacaaattagctatcgtgaagtccgctcagctcttccctttctaccctggctgctttttgcagggattggtccgtggtctccagtctcttgggttctcaccctgtgtgaaaatcttcgtgtttttccctaccccccagtcacctcttacacagcctctgcttccaagcgcagcccccacaggagtttgtaggatttctgtgctagcggggaatgtgttctcacctcatagagccaggtagaaattatgcagatgggcagttctctgggaagaaagcagggcctttggggctctcagtgtccccgttgggttgtagaca

SEQ ID NO: 681 - DNA, 1087 bp, synthetic construct
  source 1..1087: mol_type = other DNA
agtccttgctcttaactactgaaccaactctcccgtcctataagtaaattttcagagcactaatctattctacttcaagtttctcctgcatcagatccaggccagctggagcgagctacacggttaccccccctcctcccaaaggggaaaataaggatcaggtgaaaatgtttggaaattacaatagtagaatataaagaaagaatatgaaggcggccatgaaggggtagaaaggtagatgaccaggcgtcatccctgatgtcacgggtatgggcgtggtgtatgcagataagcgcgcagggtctgccgggtccgcgctccgtgcagaaatgtgaggggtttctcccgcggcgagggagggagcgcggatacgcgggtgtcagcagagcgcaagaatgtcgtgtgcgacgagggagacccgagatcggccagggctaagtgaccgtgtgttaagagtgtagaggcgacgggtgtgagccggggccgggcagtgggaaagcaatgatagggacttagggtgatagaagtgcaaagcatgactgtcaaatttttggagcaggttttctgacttcggtcggaaaacccctactttctggagtttctaaaagtagactgtacgctaagggtcatatctttttttgttttggtttgtgtcttggttggcgtcttaaatgttaatcctacagtggagggctggcgaataggaagtaacatgtcgcctgcacgccataggagaaaaagcgagcatcagccgtatcggctttgtaacacaaattagctatcgtgaagtccgctcagctcttccctttctaccctggctgctttttgcagggattggtccgtggtctccagtctcttgggttctcaccctgtgtgaaaatcttcctgtttttccctaccccccaagtcacctcttacacagcctctgcttccaagcgcagcccccacaggagtttgtaggatttctgtgctagcggggagtgtgttctcacctcatagagccaggtagaaactacgcagatgggtgctgttctccaggaagaaagcagggcctttggggctctcagtgtccccgttgggttgtaga

SEQ ID NO: 682 - DNA, 1087 bp, synthetic construct
  source 1..1087: mol_type = other DNA
agtccttgctcttaactactgaaccaactctcccgtcctataagtaaattttcagagcactaatctattctacttcaagtttctcctgcatcagatccaggccagctggagcgagctacacggttaccccccctcctcccaaaggggaaaataaggatcaggtgaaaatgtttggaaattacaatagtagaatataaagaaagaatatgaaggcggccatgaaggggtagaaaggtagatgaccaggcgtcatccctgatgtcacgggtatgggcgtggtgtatgcagataagcgcgcagggtctgccgggtccgcgctccgtgcagaaatgtgaggggtttctcccgcggcgagggagggagcgcggatacgcgggtgtcagcagagcgcaagaatgtcgtgtgcgacgagggagacccgagatcggccagggctaagtgaccgtgtgttaagagtgtagaggcgacgggtgtgagccggggccgggcagtgggaaagcaatgatagggacttagggtgatagaagtgcaaagcatgactgtcaaatttttggagcaggttttctgacttcggtcggaaaacccctactttctggagtttcaaaaacagaccgtacgccaagggtcatgtcttttttcgtattggtttgtgtcttagttgttaatcctacagtggaggcctggggaataagaagtaacatgtggcctgcacgccataggagaaaaagcgagcatcagccgtatcggctttgtaacacaaattagctatcgtgaagtccgctcagctcttccatttctaccctggctgctttttgcagggattggtccgtggtctccagtctcttgggttctcaccctgtgtgaaaatcttcgtgtttttccctaccccccaagtcacctcttacacagcctctgcttccaagcgcagcccccacaggagtttgtaggatttctgtgctagcggggagtgtgttctcacctcatagagccaggtagaaattatgcagatgggcgctgttctctgggaagaaagcagggcctttggggctctcagtgtccccgttgggttgtagacataacactctta

SEQ ID NO: 683 - DNA, 891 bp, synthetic construct
  source 1..891: mol_type = other DNA
agtccttgctcttaactactgaaccaactctcccgtcctataagtaaattttcagagcactaatctattctacttcaagtttctcctgcatcagatccaggccagctggagcgagctacacggttaccccccctcctcccaaaggggaaaataaggatcaggtgaaaatgtttggaaattacaatagtagaatataaagaaagaatatgaaggcggccatgaaggggtagaaaggtagatgaccaggcgtcatccctgatgtcacgggtatgggcgtggtgtatgcagataagcgcgcagggtctgccgggtccgcgctccgtgcagaaatgtgaggggtttctcccgcggcgagggagggagcgcggatacgcgggtgtcagcagagcgcaagaatgtcgtgtgcgacgagggagacccgagatcggccagggctaagtgaccgtgtgttaagagtgtagaggcgacgggtgtgagccggggccgggcagtgggaaagcaatgatagggacttagggtgatagaagtgcaaagcatgactgtcaaatttttggagcaggttttctgacttcggtcggaaaacccctcctccggggatacaacgtgtttcctaaaagtagagggaggtaagagacggtagcacctgcggggcggcttgcacgccgagtgcctgtgacgcgccggcttaacttaactgcttccctgaagtaccttgaggttcctgatgtgcgggcggtagacggtaggcttatgcggcacgctgtcgtttccaccgtggctactgcgctttgggaaggccacgacctcctcctttggggaggtccttaggatctcagcttggcagtcgagtgggtggcgaccttttaaaggaatgggacccacccggagttc

SEQ ID NO: 684 - DNA, 1079 bp, synthetic construct
  source 1..1079: mol_type = other DNA
agtccttgctcttaactactgaaccaactctcccgtcctataagtaaattttcagagcactaatctattctacttcaagtttctcctgcatcagatccaggccagctggagcgagctacacggttaccccccctcctcccaaaggggaaaataaggatcaggtgaaaatgtttggaaattacaatagtagaatataaagaaagaatatgaaggcggccatgaaggggtagaaaggtagatgaccaggcgtcatccctgatgtcacgggtatgggcgtggtgtatgcagataagcgcgcagggtctgccgggtccgcgctccgtgcagaaatgtgaggggtttctcccgcggcgagggagggagcgcggatacgcgggtgtcagcagagcgcaagaatgtcgtgtgcgacgagggagacccgagatcggccagggctaagtgaccgtgtgttaagagtgtagaggcgacgggtgtgagccggggccgggcagtgggaaagcaatgatagggacttagggtgatagaagtgcaaagcatgactgtcaaatttttggagcaggttttctgacttcggtcggaaaacccctttcccttcttgtaatacaaaataataacaaccacagaggacatcgcaagtaaaatgtgtataacaaccccatctaaagaaccctatcatctttctactatctgtctacctaaatatgtatagtataaataaccctatatagcactctaagcaacttaagttaggtaacttagaaaactcttttttttttttgagactgagtctcactctgtcgcacccaggctggagtgcagtggcgtgatctcggctcactgcaacctccaccttctgggttcaagtgattctcccatctcagtctcccaagtagctgggattacaggcacgccaccatgccctgctacatttttttttttttagtagagatgaggtttcaccacattggccaggctgttctcgaactcctgacctcaggtgatccgcccaccttggcctcatgaagtgctgggattacaggtgtgagccactgtacccagccagaaaactcttaaaaaac

SEQ ID NO: 685 - DNA, 969 bp, synthetic construct
  source 1..969: mol_type = other DNA
agtccttgctcttaactactgaaccaactctcccgtcctataagtaaattttcagagcactaatctattctacttcaagtttctcctgcatcagatccaggccagctggagcgagctacacggttaccccccctcctcccaaaggggaaaataaggatcaggtgaaaatgtttggaaattacaatagtagaatataaagaaagaatatgaaggcggccatgaaggggtagaaaggtagatgaccaggcgtcatccctgatgtcacgggtatgggcgtggtgtatgcagataagcgcgcagggtctgccgggtccgcgctccgtgcagaaatgtgaggggtttctcccgcggcgagggagggagcgcggatacgcgggtgtcagcagagcgcaagaatgtcgtgtgcgacgagggagacccgagatcggccagggctaagtgaccgtgtgttaagagtgtagaggcgacgggtgtgagccggggccgggcagtgggaaagcaatgatagggacttagggtgatagaagtgcaaagcatgactgtcaaatttttggagcaggttttctgacttcggtcggaaaacccctctgaattttcttgcagttgaacaacagaggctttttttgtgtgtgtgggggtgcttggttttgggaggttgaagagtacttgttcgcaaactctctaaatgagagatggggaagtgtcttaccagctgattcgcgagagcacctgcaagtttacctgttttagtgatttgcgtttatgaaagttggagttgctgattttgtgatctctacttttaaggtaaaagcagggcggtgttgacttttcttgccagttggctgtcctgttttctttctcgcactgttttctttttgagacgaagtctgtcgctcaggctggagtgcactggcgtgatctcggctcgctgcaaactttgccgaacccctgtttagcgatttccgtttg

SEQ ID NO: 686 - DNA, 1087 bp, synthetic construct
  source 1..1087: mol_type = other DNA
agtccttgctcttaactactgaaccaactctcccgtcctataagtaaattttcagagcactaatctattctacttcaagtttctcctgcatcagatccaggccagctggagcgagctacacggttaccccccctcctcccaaaggggaaaataaggatcaggtgaaaatgtttggaaattacaatagtagaatataaagaaagaatatgaaggcggccatgaaggggtagaaaggtagatgaccaggcgtcatccctgatgtcacgggtatgggcgtggtgtatgcagataagcgcgcagggtctgccgggtccgcgctccgtgcagaaatgtgaggggtttctcccgcggcgagggagggagcgcggatacgcgggtgtcagcagagcgcaagaatgtcgtgtgcgacgagggagacccgagatcggccagggctaagtgaccgtgtgttaagagtgtagaggcgacgggtgtgagccggggccgggcagtgggaaagcaatgatagggacttagggtgatagaagtgcaaagcatgactgtcaaatttttggagcaggttttctgacttcggtcggaaaacccctatatgtggtaatccaacaatagaaattatttttaagtttgtgtgttcctttttctgttcaatggtgcttttgatattgttgtaaagcagtgactagcagattctgtgtggtaaaagcactgaaccctgtttagttcttttctccctaccttattggtaattatttctgtgtatatatgttccaaagaaatgcggcttgtatattcatgcttttcaactttttgtgatagacagttgatacacaagtagtacctcctccgggatcttcttagtcaagactgtttggtagatgcatgttttttgttacttgtaatgtacagtattcagttcattttctttttgcagcactgtccggttgaaacacaacgcgaggatcgggcgtggtggctcacgcctgtaatcccagcactttgggaggccgaggcaggacaatcaagaccaatcctggtcatcaaggcaggagaatcaagaccatcgaggtcaggagatcaagaccatcct

SEQ ID NO: 687 - DNA, 1085 bp, synthetic construct
  source 1..1085: mol_type = other DNA
agtccttgctcttaactactgaaccaactctcccgtcctataagtaaattttcagagcactaatctattctacttcaagtttctcctgcatcagatccaggccagctggagcgagctacacggttaccccccctcctcccaaaggggaaaataaggatcaggtgaaaatgtttggaaattacaatagtagaatataaagaaagaatatgaaggcggccatgaaggggtagaaaggtagatgaccaggcgtcatccctgatgtcacgggtatgggcgtggtgtatgcagataagcgcgcagggtctgccgggtccgcgctccgtgcagaaatgtgaggggtttctcccgcggcgagggagggagcgcggatacgcgggtgtcagcagagcgcaagaatgtcgtgtgcgacgagggagacccgagatcggccagggctaagtgaccgtgtgttaagagtgtagaggcgacgggtgtgagccggggccgggcagtgggaaagcaatgatagggacttagggtgatagaagtgcaaagcatgactgtcaaatttttggagcaggttttctgacttcggtcggaaaacccctacatcaggttgtttttctgtttttacatcaggttgtttttctgtttggttttttttttacaccacgtttatacgccggtgcacggtttaccactgaaaacacctttcatctacaggtgatatcttttaacacaaataaaatgtagtagtcctaggagacggaatagaaggaggtggggcctaggcagattcatctctgcggtgcattttgcctctggccctcgggccctagtttgcgatctttcccatcttgcctctgcttccctctgcacaatcctgagtattgcagtaccttacacttaaggaaatttcgtcttgccaaagttgatccatttcagctccgaaacataacaggaactagtgcaacgataaacgtatgaggaacttgcaataagagtgacagaatcctttgaatcaaaaaaaaaaaaagccaccacttaatgagtatctaccatatgtcaagggcttcaccaatatttcattgaaatattccagacca

SEQ ID NO: 688 - DNA, 1087 bp, synthetic construct
  source 1..1087: mol_type = other DNA
agtccttgctcttaactactgaaccaactctcccgtcctataagtaaattttcagagcactaatctattctacttcaagtttctcctgcatcagatccaggccagctggagcgagctacacggttaccccccctcctcccaaaggggaaaataaggatcaggtgaaaatgtttggaaattacaatagtagaatataaagaaagaatatgaaggcggccatgaaggggtagaaaggtagatgaccaggcgtcatccctgatgtcacgggtatgggcgtggtgtatgcagataagcgcgcagggtctgccgggtccgcgctccgtgcagaaatgtgaggggtttctcccgcggcgagggagggagcgcggatacgcgggtgtcagcagagcgcaagaatgtcgtgtgcgacgagggagacccgagatcggccagggctaagtgaccgtgtgttaagagtgtagaggcgacgggtgtgagccggggccgggcagtgggaaagcaatgatagggacttagggtgatagaagtgcaaagcatgactgtcaaatttttggagcaggttttctgacttcggtcggaaaacccctcttatgatgtttgttgccaatgatagattgttttcactgtgcaaaaattatgggtagttttggtggtcttgatgcagttgtaagcttggggtatgaaggtttgggccacgcctgggcgcttccggctgcgccggatgctgtttcctttccgctcccaggggcgttgggaacggttgtaggacgtggctctttattcgtgagttttccatttacctccgctgaacctagagcttcagacgccctatggcgtccgcctcgacccaaccggcggccttgagcgctgagcaagcaaagggtgagaatcgtcctagtcaaggcataggctgctggcctggggtagtcaaggcatgggctgctggtctggggaggatgcgggcggaggatgtggggcgacaaacctggctacgtccgccgggaaaatggggtaggggacgccgggtaccgtccttctaagtggggcgcttgcccccaagacttgggatcttattgggttacctaca

SEQ ID NO: 689 - DNA, 1085 bp, synthetic construct
  source 1..1085: mol_type = other DNA
agtccttgctcttaactactgaaccaactctcccgtcctataagtaaattttcagagcactaatctattctacttcaagtttctcctgcatcagatccaggccagctggagcgagctacacggttaccccccctcctcccaaaggggaaaataaggatcaggtgaaaatgtttggaaattacaatagtagaatataaagaaagaatatgaaggcggccatgaaggggtagaaaggtagatgaccaggcgtcatccctgatgtcacgggtatgggcgtggtgtatgcagataagcgcgcagggtctgccgggtccgcgctccgtgcagaaatgtgaggggtttctcccgcggcgagggagggagcgcggatacgcgggtgtcagcagagcgcaagaatgtcgtgtgcgacgagggagacccgagatcggccagggctaagtgaccgtgtgttaagagtgtagaggcgacgggtgtgagccggggccgggcagtgggaaagcaatgatagggacttagggtgatagaagtgcaaagcatgactgtcaaatttttggagcaggttttctgacttcggtcggaaaaccccttctttactgttatatgttaggcgaaatattacgcgtttggagtaagtggtgctttttgtaactgaaaagagattctgtgtgtgtttttttttttttagaggctgcatagttatttgtatgaaccgcaggtgacctaattagcaaggtaattcagacctgtatcctagcacttaagaagtggaagtgggataaccctgcgtgttctcgtgtgggaggctagcttaagcaacaaagcaggaaggccccaccaacaaaagaatttaaaaattatacgtgcgtggtggcgcgcgtatgaggaaattatttggcaactgtgttacagtatagcagcaaatggaatagacctagtccctgactttaggagacctgcctcagccccccgaatggctgggactacaggcgtgcgcctccgcgcccagctaatttttgcatttttggtagagacgggttcaccatgttggccaggatggtctccatctcttcatctggtgatccgcc

SEQ ID NO: 690 - DNA, 1087 bp, synthetic construct
  source 1..1087: mol_type = other DNA
agtccttgctcttaactactgaaccaactctcccgtcctataagtaaattttcagagcactaatctattctacttcaagtttctcctgcatcagatccaggccagctggagcgagctacacggttaccccccctcctcccaaaggggaaaataaggatcaggtgaaaatgtttggaaattacaatagtagaatataaagaaagaatatgaaggcggccatgaaggggtagaaaggtagatgaccaggcgtcatccctgatgtcacgggtatgggcgtggtgtatgcagataagcgcgcagggtctgccgggtccgcgctccgtgcagaaatgtgaggggtttctcccgcggcgagggagggagcgcggatacgcgggtgtcagcagagcgcaagaatgtcgtgtgcgacgagggagacccgagatcggccagggctaagtgaccgtgtgttaagagtgtagaggcgacgggtgtgagccggggccgggcagtgggaaagcaatgatagggacttagggtgatagaagtgcaaagcatgactgtcaaatttttggagcaggttttctgacttcggtcggaaaacccctaccttattcacgcctaaaaagtagactgactgtggggtggtcgtgttttttgtttcttgttggtaggtggtgaatgcgtttttttcgttgttttctccgttactcaggctgccagttgcttggcagtcttgtcgctggctgtggacgctctgcacttcatcaccgtccccagctgcgctttgagccggtctaaggttgcccacagtattgacgttgggacccacgaaactggcaatttccatgtgtgcggccttacccagttctcccaaacttctgcgtataaccgcttctctgtgcttcagaaagataagtccggccccggcctcacacagcagctcagttcgtgacagcgtttaatatgtaaaatggagcaaataatttatagggcgttgggagagttaaagagactaattcatttacgtgttaaatacagggaatggcttttgcattgatataaccccagcctccagcatgcgccagacctgacgtaggtgttcggc

SEQ ID NO: 691 - DNA, 1087 bp, synthetic construct
  source 1..1087: mol_type = other DNA
agtccttgctcttaactactgaaccaactctcccgtcctataagtaaattttcagagcactaatctattctacttcaagtttctcctgcatcagatccaggccagctggagcgagctacacggttaccccccctcctcccaaaggggaaaataaggatcaggtgaaaatgtttggaaattacaatagtagaatataaagaaagaatatgaaggcggccatgaaggggtagaaaggtagatgaccaggcgtcatccctgatgtcacgggtatgggcgtggtgtatgcagataagcgcgcagggtctgccgggtccgcgctccgtgcagaaatgtgaggggtttctcccgcggcgagggagggagcgcggatacgcgggtgtcagcagagcgcaagaatgtcgtgtgcgacgagggagacccgagatcggccagggctaagtgaccgtgtgttaagagtgtagaggcgacgggtgtgagccggggccgggcagtgggaaagcaatgatagggacttagggtgatagaagtgcaaagcatgactgtcaaatttttggagcaggttttctgacttcggtcggaaaaccccttttgacccattacccatctaagttagatgcttttttaaatgttttttaatttttaaatttttaatttttttcattatttattttttatttttgagacggatctcggctcactgtaacctccacctcccgggttcaagcgattctcctgactcagcctcccgagtagctgggattacaggcgcgcgccaccatgcccggctaatttttctatttttagtaaagacggggtttcgccatgttgaccagggtggtcttgaactcctgacgtcaggtgatcctcctgcctcgtgctgggattgcaggcgtgagccaccgctcccggcccttagatgctttttaatcagcaagtacgcaatgctttcctgacaggaatgtcaagtccgtcaggaaatccacataagggtgttaagcaggcaaagtaccacatacagattaaaatcaaaagcactgtcaacgcttatttaatttatacagtagaccctaacttttctaattttgtg

SEQ ID NO: 692 - DNA, 1087 bp, synthetic construct
  source 1..1087: mol_type = other DNA
agtccttgctcttaactactgaaccaactctcccgtcctataagtaaattttcagagcactaatctattctacttcaagtttctcctgcatcagatccaggccagctggagcgagctacacggttaccccccctcctcccaaaggggaaaataaggatcaggtgaaaatgtttggaaattacaatagtagaatataaagaaagaatatgaaggcggccatgaaggggtagaaaggtagatgaccaggcgtcatccctgatgtcacgggtatgggcgtggtgtatgcagataagcgcgcagggtctgccgggtccgcgctccgtgcagaaatgtgaggggtttctcccgcggcgagggagggagcgcggatacgcgggtgtcagcagagcgcaagaatgtcgtgtgcgacgagggagacccgagatcggccagggctaagtgaccgtgtgttaagagtgtagaggcgacgggtgtgagccggggccgggcagtgggaaagcaatgatagggacttagggtgatagaagtgcaaagcatgactgtcaaatttttggagcaggttttctgacttcggtcggaaaacccctgtttacttggttttaaaaatagcttgcactagcgataccgcgaatatggttattaggtttgttaggcacagtcgtgtcttactatagaaaaataacgtagtgttcattttgctgcctgtatgtgttaatttgtccttattgcgccattgttcttgttaagtcttctgtaaggagttgcgggtttcaaactgtcagtctgagagcataagctcacttttcagtcagttgaattgaatgttacattcgattggttctggatattgatattacccaaggcttgtcctgtttgtaagtcttttcctacacctgacaatatgattatgtttacaatgtccctagaactctgggtgtatcgttcccactgaataaaatttgatctctaagttgacctataaatttaagtaccaaaaaactggtttgtaagattttggaaggcagaggcagggaagagaccaacgtggtctacatataaagtaccaggtacatataaagtaccaggt

SEQ ID NO: 693 - DNA, 1083 bp, synthetic construct
  source 1..1083: mol_type = other DNA
agtccttgctcttaactactgaaccaactctcccgtcctataagtaaattttcagagcactaatctattctacttcaagtttctcctgcatcagatccaggccagctggagcgagctacacggttaccccccctcctcccaaaggggaaaataaggatcaggtgaaaatgtttggaaattacaatagtagaatataaagaaagaatatgaaggcggccatgaaggggtagaaaggtagatgaccaggcgtcatccctgatgtcacgggtatgggcgtggtgtatgcagataagcgcgcagggtctgccgggtccgcgctccgtgcagaaatgtgaggggtttctcccgcggcgagggagggagcgcggatacgcgggtgtcagcagagcgcaagaatgtcgtgtgcgacgagggagacccgagatcggccagggctaagtgaccgtgtgttaagagtgtagaggcgacgggtgtgagccggggccgggcagtgggaaagcaatgatagggacttagggtgatagaagtgcaaagcatgactgtcaaatttttggagcaggttttctgacttcggtcggaaaacccctatttttgtggtgctaaaagttagattgcattccgcccttctcacgtctctttacgtgttgtttgcgaggcgtggcctcggaggtaaatggtctccttttacctcagataagcttacctttgctctgtgagtaagaatgtagctacacttccaaatttagctattgtcctttgcggtccaaatgaaaatattaccttccgatctaacaatgttaaactagtcccaggcccttctatcgattgccagaatagactagactactacacagacacaccctctcaaatcaggccagctcctgcaacctgcacctacagtttgtcccctgggacaaatgaaaggacaggccctctttcccccccccccccaaatcagagcacacacagatcttggggtctggggcagaaatttcgttcatggaaaaaacaaacaaacaaacaaacacgatcaaaggaagctcgttccctttggcctcagggtttcttagacgccgtgttccc

SEQ ID NO: 694 - DNA, 1084 bp, synthetic construct
  source 1..1084: mol_type = other DNA
agtccttgctcttaactactgaaccaactctcccgtcctataagtaaattttcagagcactaatctattctacttcaagtttctcctgcatcagatccaggccagctggagcgagctacacggttaccccccctcctcccaaaggggaaaataaggatcaggtgaaaatgtttggaaattacaatagtagaatataaagaaagaatatgaaggcggccatgaaggggtagaaaggtagatgaccaggcgtcatccctgatgtcacgggtatgggcgtggtgtatgcagataagcgcgcagggtctgccgggtccgcgctccgtgcagaaatgtgaggggtttctcccgcggcgagggagggagcgcggatacgcgggtgtcagcagagcgcaagaatgtcgtgtgcgacgagggagacccgagatcggccagggctaagtgaccgtgtgttaagagtgtagaggcgacgggtgtgagccggggccgggcagtgggaaagcaatgatagggacttagggtgatagaagtgcaaagcatgactgtcaaatttttggagcaggttttctgacttcggtcggaaaacccctataactggtaaccaaaagcagattactttcccccttgtggtcttcgcgtttgcggacgggagagaactttcggccattttccttttagaaatttaacttcttgaaggccaccaggtgacccttacttccctctcacctttccttctacctgtactttctctattaaaaagcctgcagaagtacccttgacaaattgccaaaaatgacacctaaaaaaaaaaaaaggaaaaacgacaccttaggtaattataggttgtaagaaaaagatttgacctcttggagtttttatttcttaataccaaaggacacccaaggaacgtatctctcaaaattgggtttcaaacctcagccgtttccttcttagttccagtgcttaacacgcaacagacctgcacaccactacactgcatacgagttttaaagttaataaatcagtcacccctccatagtcttctacctacttgaagacagaaacggctgctaggaagcaattcttc

SEQ ID NO: 695 - DNA, 1087 bp, synthetic construct
  source 1..1087: mol_type = other DNA
agtccttgctcttaactactgaaccaactctcccgtcctataagtaaattttcagagcactaatctattctacttcaagtttctcctgcatcagatccaggccagctggagcgagctacacggttaccccccctcctcccaaaggggaaaataaggatcaggtgaaaatgtttggaaattacaatagtagaatataaagaaagaatatgaaggcggccatgaaggggtagaaaggtagatgaccaggcgtcatccctgatgtcacgggtatgggcgtggtgtatgcagataagcgcgcagggtctgccgggtccgcgctccgtgcagaaatgtgaggggtttctcccgcggcgagggagggagcgcggatacgcgggtgtcagcagagcgcaagaatgtcgtgtgcgacgagggagacccgagatcggccagggctaagtgaccgtgtgttaagagtgtagaggcgacgggtgtgagccggggccgggcagtgggaaagcaatgatagggacttagggtgatagaagtgcaaagcatgactgtcaaatttttggagcaggttttctgacttcggtcggaaaacccctctggggaataagagtggtttaaagaaagaacaatttgagagatctgcttagatctaataaaacccaagtatagtttctttagacgtcttatatctcacgtaggacctcttatttcagactcactgcaagaacaagctaaagaactatatacagtcaggaacaaggtgagccatcgcggttctcagtcccatgatcttaagagtttttcctcttcccctcttccctggctgtcctggagctcactctgtagaccaggctggtctcaaactcagaaatccacttacctctgcctcccaagggctgggattaaaggcatgcaccaccattgcccggcagggtatgtggactatgctgtccttcaactcagagatcgtggtactttaaatctcattttccgaaagaaaagaaaagaaaggaaggggggaaataaagccagtatattttgcacccacaatctgaagttctacaaatattgttagaaaatgcaaaggacccaagtc

SEQ ID NO: 696 - DNA, 1087 bp, synthetic construct
  source 1..1087: mol_type = other DNA
agtccttgctcttaactactgaaccaactctcccgtcctataagtaaattttcagagcactaatctattctacttcaagtttctcctgcatcagatccaggccagctggagcgagctacacggttaccccccctcctcccaaaggggaaaataaggatcaggtgaaaatgtttggaaattacaatagtagaatataaagaaagaatatgaaggcggccatgaaggggtagaaaggtagatgaccaggcgtcatccctgatgtcacgggtatgggcgtggtgtatgcagataagcgcgcagggtctgccgggtccgcgctccgtgcagaaatgtgaggggtttctcccgcggcgagggagggagcgcggatacgcgggtgtcagcagagcgcaagaatgtcgtgtgcgacgagggagacccgagatcggccagggctaagtgaccgtgtgttaagagtgtagaggcgacgggtgtgagccggggccgggcagtgggaaagcaatgatagggacttagggtgatagaagtgcaaagcatgactgtcaaatttttggagcaggttttctgacttcggtcggaaaacccctctcggtttatcttaaagggttttaaatatagaaagcttccttagtcttatgggtgagagtgctgtttaagccttacctaggtatgtctttgaacatttattacagattgttatttgtgactatgaccactcaggtgttctgttcttgtgaatttagacacactcagaaaggctacacactcaaagaccacaccaaagtgaagtactatctgggccgtgaaactggtcacatatcagttattttgcagtaaaacaaggaagtcaatcatactgcttcagtgggtcagggagtcaagaatgcacagtacaagagctggtgagattcctcagcaggtaagagcactgaatgctcttccaaagattctgagttcaaatcccagcaaccacgtggtggatttgaacaaaggatgaaaacaaccatccataaccagatctgatgccctcttctggagtgtcaaaagacagctatggtgtacttacataaataaataagtaaaaaca

SEQ ID NO: 697 - DNA, 1087 bp, synthetic construct
  source 1..1087: mol_type = other DNA
agtccttgctcttaactactgaaccaactctcccgtcctataagtaaattttcagagcactaatctattctacttcaagtttctcctgcatcagatccaggccagctggagcgagctacacggttaccccccctcctcccaaaggggaaaataaggatcaggtgaaaatgtttggaaattacaatagtagaatataaagaaagaatatgaaggcggccatgaaggggtagaaaggtagatgaccaggcgtcatccctgatgtcacgggtatgggcgtggtgtatgcagataagcgcgcagggtctgccgggtccgcgctccgtgcagaaatgtgaggggtttctcccgcggcgagggagggagcgcggatacgcgggtgtcagcagagcgcaagaatgtcgtgtgcgacgagggagacccgagatcggccagggctaagtgaccgtgtgttaagagtgtagaggcgacgggtgtgagccggggccgggcagtgggaaagcaatgatagggacttagggtgatagaagtgcaaagcatgactgtcaaatttttggagcaggttttctgacttcggtcggaaaacccctccacattttgtgtttaaaaatagaaatatttaagtgagatcagtttaaatctgctttatctagggtgtctaactgcttgcatctttttaacttttccttatttgtgagaaggtctgtaaaacttattatatgttagtacactgtagctgtcttcagacactccagaagagggattcagatcaccttacagatggttttgagccaccatgtggttgctgggatttgaactcaggacctttagaaaagtagttgggtgctcttacccgctgagccatctcaccagccctttttttttcttttttccagttcgggtttctctgtgtgtagccctggctgtcctggaactcattctgtagaccgggctggcctcgaactcagaaatctgcctgcctctgcctcccaagtgctgggattaaaggaatgtgccttcattgcccggctctagggctttttgttgttgtttgtttgtttgtttgtttgtttgcttttgtggatggcct

SEQ ID NO: 698 - DNA, 1087 bp, synthetic construct
  source 1..1087: mol_type = other DNA
agtccttgctcttaactactgaaccaactctcccgtcctataagtaaattttcagagcactaatctattctacttcaagtttctcctgcatcagatccaggccagctggagcgagctacacggttaccccccctcctcccaaaggggaaaataaggatcaggtgaaaatgtttggaaattacaatagtagaatataaagaaagaatatgaaggcggccatgaaggggtagaaaggtagatgaccaggcgtcatccctgatgtcacgggtatgggcgtggtgtatgcagataagcgcgcagggtctgccgggtccgcgctccgtgcagaaatgtgaggggtttctcccgcggcgagggagggagcgcggatacgcgggtgtcagcagagcgcaagaatgtcgtgtgcgacgagggagacccgagatcggccagggctaagtgaccgtgtgttaagagtgtagaggcgacgggtgtgagccggggccgggcagtgggaaagcaatgatagggacttagggtgatagaagtgcaaagcatgactgtcaaatttttggagcaggttttctgacttcggtcggaaaacccctaaaaccagtaagggagaaaggtcaagtaacatataaaggaaggcctatcagaattacaccagacttttcaccagagactatgaaagccagaagagcctggacagatgttatacagacactaagagaacacaaatgccagcccaggctactatacctggccaaactctcaattaccatagatggagaaaccaaagtattccacgacaaaaacaaattcacacaatatctttccacgaatccagcccttcaaaggataatgacagaaaagaagcaatacaaggacggaaatcacgccctagaacaaccaagaaactaatcattcaacaaaccaaaaagaagacagccacaagaacagaatgccaactctaacaacaaaaataaaaggaagcaacaattacttttccttaatatctcttaatatcaatggactcaattccccaataaaaagacatagactaacagactggctacacaaacaggacccaacattctgctgctta

SEQ ID NO: 699 - DNA, 1087 bp, synthetic construct
  source 1..1087: mol_type = other DNA
agtccttgctcttaactactgaaccaactctcccgtcctataagtaaattttcagagcactaatctattctacttcaagtttctcctgcatcagatccaggccagctggagcgagctacacggttaccccccctcctcccaaaggggaaaataaggatcaggtgaaaatgtttggaaattacaatagtagaatataaagaaagaatatgaaggcggccatgaaggggtagaaaggtagatgaccaggcgtcatccctgatgtcacgggtatgggcgtggtgtatgcagataagcgcgcagggtctgccgggtccgcgctccgtgcagaaatgtgaggggtttctcccgcggcgagggagggagcgcggatacgcgggtgtcagcagagcgcaagaatgtcgtgtgcgacgagggagacccgagatcggccagggctaagtgaccgtgtgttaagagtgtagaggcgacgggtgtgagccggggccgggcagtgggaaagcaatgatagggacttagggtgatagaagtgcaaagcatgactgtcaaatttttggagcaggttttctgacttcggtcggaaaacccctcccaatttcactggtctacaatgaaagcaaaacagttctcttccccgctccccggtgtgtgagaggggctttgatccttctctggtttcctaggaaacgcgtatgtgctagagccacgctctgagacttccgcctcgtgcggtcccgcttcctttctgcctcctctggcctgcatccgtgggggaggtggctggctgcagggttctccggatctcttctgtgttcccactactcaagcaccgagtggcgttctatggcgtccgcctcggctcagcccgcggccctgagcgcggagcaggccaagggtgaggaaagagcctagtctgggtgtgggccgtcttctggggggagggcgcgatactattctttgcctctccaagtggggcccttgcccattagggcgaagggttgggaggacaagcttatcgggttgcttgcaggcctcggcccactaattccctgcctcttccctcctctgggctcgcccgccgtcctccgcg

SEQ ID NO: 700 - DNA, 1087 bp, synthetic construct
  source 1..1087: mol_type = other DNA
agtccttgctcttaactactgaaccaactctcccgtcctataagtaaattttcagagcactaatctattctacttcaagtttctcctgcatcagatccaggccagctggagcgagctacacggttaccccccctcctcccaaaggggaaaataaggatcaggtgaaaatgtttggaaattacaatagtagaatataaagaaagaatatgaaggcggccatgaaggggtagaaaggtagatgaccaggcgtcatccctgatgtcacgggtatgggcgtggtgtatgcagataagcgcgcagggtctgccgggtccgcgctccgtgcagaaatgtgaggggtttctcccgcggcgagggagggagcgcggatacgcgggtgtcagcagagcgcaagaatgtcgtgtgcgacgagggagacccgagatcggccagggctaagtgaccgtgtgttaagagtgtagaggcgacgggtgtgagccggggccgggcagtgggaaagcaatgatagggacttagggtgatagaagtgcaaagcatgactgtcaaatttttggagcaggttttctgacttcggtcggaaaacccctgaatttgttaaattacaggaggaagcttttttagttcattttacaaatactttcttgttaggtagataataccttctaaggttattatctggatcttctaagtctttttatcgctagcaagtctaagtttctggactttggaattagaagttaatgtcgtaggcgggcatggtggtccacgcctttaatcccagagtttgggaggcagacgcaggtggttttctgagttcgaggccatcctgctcttcaatgttagttccaggacagccagggttatacaaagaaaccctgtctcgagaaacaaaacaaacaaaaaaagagtagctgagtgctctgagttgtctctccagccccttagctatttattttcatttaaattatttttgttttattcgcttgtgtgcctgagtttgaatttcccgggattaacagttgaagactagggctggtgagatggctcagcggttaagattgccgactgctcttccaaaggtcctgag

SEQ ID NO: 701 - DNA, 1087 bp, synthetic construct
  source 1..1087: mol_type = other DNA
agtccttgctcttaactactgaaccaactctcccgtcctataagtaaattttcagagcactaatctattctacttcaagtttctcctgcatcagatccaggccagctggagcgagctacacggttaccccccctcctcccaaaggggaaaataaggatcaggtgaaaatgtttggaaattacaatagtagaatataaagaaagaatatgaaggcggccatgaaggggtagaaaggtagatgaccaggcgtcatccctgatgtcacgggtatgggcgtggtgtatgcagataagcgcgcagggtctgccgggtccgcgctccgtgcagaaatgtgaggggtttctcccgcggcgagggagggagcgcggatacgcgggtgtcagcagagcgcaagaatgtcgtgtgcgacgagggagacccgagatcggccagggctaagtgaccgtgtgttaagagtgtagaggcgacgggtgtgagccggggccgggcagtgggaaagcaatgatagggacttagggtgatagaagtgcaaagcatgactgtcaaatttttggagcaggttttctgacttcggtcggaaaacccctaccccctaattctacaagaatagaaagcttagcagctcctctgaatggttgctctcaggtgctagtggttgcaagtcgtatgttgatgcctgcctttgccctacctggtgtgtgagcgtgagcgcgccccacctctccagcctctctcttactgtttttcagacaagatgggactgttgttctcctactgctatgtacctcaatttcaattgatcatgcctggacataactgcccatgttgtaaggtcgtctacgttgtaaggtcgtgctcagtttctgatgcctagactagtcacctttccgtttgcctcctgactgtgtaaatgaggcaaatgaaggtggtctcttaactgacatgttagtgtttgacctatgggatagtttctcattgttgagacagaatttctagaagctggtccgctgagcggctaagagcacttgctgatattgcaaaggatctacctgggtttggttctcagcactcacatggaagttcacat

SEQ ID NO: 702 - DNA, 654 bp, synthetic construct
  source 1..654: mol_type = other DNA
agtccttgctcttaactactgaaccaactctcccgtcctataagtaaattttcagagcactaatctattctacttcaagtttctcctgcatcagatccaggccagctggagcgagctacacggttaccccccctcctcccaaaggggaaaataaggatcaggtgaaaatgtttggaaattacaatagtagaatataaagaaagaatatgaaggcggccatgaaggggtagaaaggtagatgaccaggcgtcatccctgatgtcacgggtatgggcgtggtgtatgcagataagcgcgcagggtctgccgggtccgcgctccgtgcagaaatgtgaggggtttctcccgcggcgagggagggagcgcggatacgcgggtgtcagcagagcgcaagaatgtcgtgtgcgacgagggagacccgagatcggccagggctaagtgaccgtgtgttaagagtgtagaggcgacgggtgtgagccggggccgggcagtgggaaagcaatgatagggacttagggtgatagaagtgcaaagcatgactgtcaaatttttggagcaggttttctgacttcggtcggaaaaccccttgtagttcctgcaatttaattttcgtttaaaactttattttattctttaacttaaaaaaaatatata

SEQ ID NO: 703 - DNA, 1087 bp, synthetic construct
  source 1..1087: mol_type = other DNA
cggtggggctggctcctgtgctgcccgactcctgtgctccgacttggagaagacgggcgtccgttcgtccatacccaaaagagtcggccacaaggatgttggcacctgggggtgggccacgagcggccagttaggggtaagagacggtgcaaggtgacttgtccctggtccttcaccgctccagcactgcgccagtgagaaagtccaacaggccccgggatcgggcggcgaaaggaaggggcgtgatgtcactcctgggtggctgacggggcggggtgtatgcagatgagggtcgcgcaggggctgcggcgtccgcagcggccggggaaacgcgagagatttctcgcgcggcgtgggagagaacgcgggtcgccagatgtcagcggagcgccgagacggcgtgtgcgacgagggagacccgagatcgggcggggctaagtgaccgtgtgttaagagtgcaggggcggcgggtgtgagccggggccgggcgctgggagagcaatgatagggacttagggtgatagaagtgcaaagcatgactgtcaaatttttggagcaggttttctgacttcggtcggaaaacccctactttctggagtttcaaaaacagactgtacgccaagggtcatatctttttttgtattggtttgtgtcttggttggtgtcttaggtgttaatcctacagtggagggtttatgggaataggaagtaacatgtcgcctgcatgtcataggagaaaaagcgagcatcagccgtatcggctttgtaacacaaattagctatcgtgaagtccgctcagctcttccctttctaccctggctgctttttgcagggattggtccgtggtctccagtctcttgggttctcaccctgtgtgaaaatcttcgtgtttttccctaccccccagtcacctcttacacagcctctgcttccaagcgcagcccccacaggagtttgtaggatttctgtgctagcggggaatgtgttctcacctcatagagccaggtagaaattatgcagatgggcagttctctgggaagaaagcagggcctttggggctctcagtgtccccgttgggttgtagaca

SEQ ID NO: 704 - DNA, 1087 bp, synthetic construct
  source 1..1087: mol_type = other DNA
cggtggggctggctcctgtgctgcccgactcctgtgctccgacttggagaagacgggcgtccgttcgtccatacccaaaagagtcggccacaaggatgttggcacctgggggtgggccacgagcggccagttaggggtaagagacggtgcaaggtgacttgtccctggtccttcaccgctccagcactgcgccagtgagaaagtccaacaggccccgggatcgggcggcgaaaggaaggggcgtgatgtcactcctgggtggctgacggggcggggtgtatgcagatgagggtcgcgcaggggctgcggcgtccgcagcggccggggaaacgcgagagatttctcgcgcggcgtgggagagaacgcgggtcgccagatgtcagcggagcgccgagacggcgtgtgcgacgagggagacccgagatcgggcggggctaagtgaccgtgtgttaagagtgcaggggcggcgggtgtgagccggggccgggcgctgggagagcaatgatagggacttagggtgatagaagtgcaaagcatgactgtcaaatttttggagcaggttttctgacttcggtcggaaaacccctactttctggagtttctaaaagtagactgtacgctaagggtcatatctttttttgttttggtttgtgtcttggttggcgtcttaaatgttaatcctacagtggagggctggcgaataggaagtaacatgtcgcctgcacgccataggagaaaaagcgagcatcagccgtatcggctttgtaacacaaattagctatcgtgaagtccgctcagctcttccctttctaccctggctgctttttgcagggattggtccgtggtctccagtctcttgggttctcaccctgtgtgaaaatcttcctgtttttccctaccccccaagtcacctcttacacagcctctgcttccaagcgcagcccccacaggagtttgtaggatttctgtgctagcggggagtgtgttctcacctcatagagccaggtagaaactacgcagatgggtgctgttctccaggaagaaagcagggcctttggggctctcagtgtccccgttgggttgtaga

SEQ ID NO: 705 - DNA, 1087 bp, synthetic construct
  source 1..1087: mol_type = other DNA
cggtggggctggctcctgtgctgcccgactcctgtgctccgacttggagaagacgggcgtccgttcgtccatacccaaaagagtcggccacaaggatgttggcacctgggggtgggccacgagcggccagttaggggtaagagacggtgcaaggtgacttgtccctggtccttcaccgctccagcactgcgccagtgagaaagtccaacaggccccgggatcgggcggcgaaaggaaggggcgtgatgtcactcctgggtggctgacggggcggggtgtatgcagatgagggtcgcgcaggggctgcggcgtccgcagcggccggggaaacgcgagagatttctcgcgcggcgtgggagagaacgcgggtcgccagatgtcagcggagcgccgagacggcgtgtgcgacgagggagacccgagatcgggcggggctaagtgaccgtgtgttaagagtgcaggggcggcgggtgtgagccggggccgggcgctgggagagcaatgatagggacttagggtgatagaagtgcaaagcatgactgtcaaatttttggagcaggttttctgacttcggtcggaaaacccctactttctggagtttcaaaaacagaccgtacgccaagggtcatgtcttttttcgtattggtttgtgtcttagttgttaatcctacagtggaggcctggggaataagaagtaacatgtggcctgcacgccataggagaaaaagcgagcatcagccgtatcggctttgtaacacaaattagctatcgtgaagtccgctcagctcttccatttctaccctggctgctttttgcagggattggtccgtggtctccagtctcttgggttctcaccctgtgtgaaaatcttcgtgtttttccctaccccccaagtcacctcttacacagcctctgcttccaagcgcagcccccacaggagtttgtaggatttctgtgctagcggggagtgtgttctcacctcatagagccaggtagaaattatgcagatgggcgctgttctctgggaagaaagcagggcctttggggctctcagtgtccccgttgggttgtagacataacactctta

SEQ ID NO: 706 - DNA, 891 bp, synthetic construct
  source 1..891: mol_type = other DNA
cggtggggctggctcctgtgctgcccgactcctgtgctccgacttggagaagacgggcgtccgttcgtccatacccaaaagagtcggccacaaggatgttggcacctgggggtgggccacgagcggccagttaggggtaagagacggtgcaaggtgacttgtccctggtccttcaccgctccagcactgcgccagtgagaaagtccaacaggccccgggatcgggcggcgaaaggaaggggcgtgatgtcactcctgggtggctgacggggcggggtgtatgcagatgagggtcgcgcaggggctgcggcgtccgcagcggccggggaaacgcgagagatttctcgcgcggcgtgggagagaacgcgggtcgccagatgtcagcggagcgccgagacggcgtgtgcgacgagggagacccgagatcgggcggggctaagtgaccgtgtgttaagagtgcaggggcggcgggtgtgagccggggccgggcgctgggagagcaatgatagggacttagggtgatagaagtgcaaagcatgactgtcaaatttttggagcaggttttctgacttcggtcggaaaacccctcctccggggatacaacgtgtttcctaaaagtagagggaggtaagagacggtagcacctgcggggcggcttgcacgccgagtgcctgtgacgcgccggcttaacttaactgcttccctgaagtaccttgaggttcctgatgtgcgggcggtagacggtaggcttatgcggcacgctgtcgtttccaccgtggctactgcgctttgggaaggccacgacctcctcctttggggaggtccttaggatctcagcttggcagtcgagtgggtggcgaccttttaaaggaatgggacccacccggagttc

SEQ ID NO: 707 - DNA, 1079 bp, synthetic construct
  source 1..1079: mol_type = other DNA
cggtggggctggctcctgtgctgcccgactcctgtgctccgacttggagaagacgggcgtccgttcgtccatacccaaaagagtcggccacaaggatgttggcacctgggggtgggccacgagcggccagttaggggtaagagacggtgcaaggtgacttgtccctggtccttcaccgctccagcactgcgccagtgagaaagtccaacaggccccgggatcgggcggcgaaaggaaggggcgtgatgtcactcctgggtggctgacggggcggggtgtatgcagatgagggtcgcgcaggggctgcggcgtccgcagcggccggggaaacgcgagagatttctcgcgcggcgtgggagagaacgcgggtcgccagatgtcagcggagcgccgagacggcgtgtgcgacgagggagacccgagatcgggcggggctaagtgaccgtgtgttaagagtgcaggggcggcgggtgtgagccggggccgggcgctgggagagcaatgatagggacttagggtgatagaagtgcaaagcatgactgtcaaatttttggagcaggttttctgacttcggtcggaaaacccctttcccttcttgtaatacaaaataataacaaccacagaggacatcgcaagtaaaatgtgtataacaaccccatctaaagaaccctatcatctttctactatctgtctacctaaatatgtatagtataaataaccctatatagcactctaagcaacttaagttaggtaacttagaaaactcttttttttttttgagactgagtctcactctgtcgcacccaggctggagtgcagtggcgtgatctcggctcactgcaacctccaccttctgggttcaagtgattctcccatctcagtctcccaagtagctgggattacaggcacgccaccatgccctgctacatttttttttttttagtagagatgaggtttcaccacattggccaggctgttctcgaactcctgacctcaggtgatccgcccaccttggcctcatgaagtgctgggattacaggtgtgagccactgtacccagccagaaaactcttaaaaaac

SEQ ID NO: 708 - DNA, 969 bp, synthetic construct
  source 1..969: mol_type = other DNA
cggtggggctggctcctgtgctgcccgactcctgtgctccgacttggagaagacgggcgtccgttcgtccatacccaaaagagtcggccacaaggatgttggcacctgggggtgggccacgagcggccagttaggggtaagagacggtgcaaggtgacttgtccctggtccttcaccgctccagcactgcgccagtgagaaagtccaacaggccccgggatcgggcggcgaaaggaaggggcgtgatgtcactcctgggtggctgacggggcggggtgtatgcagatgagggtcgcgcaggggctgcggcgtccgcagcggccggggaaacgcgagagatttctcgcgcggcgtgggagagaacgcgggtcgccagatgtcagcggagcgccgagacggcgtgtgcgacgagggagacccgagatcgggcggggctaagtgaccgtgtgttaagagtgcaggggcggcgggtgtgagccggggccgggcgctgggagagcaatgatagggacttagggtgatagaagtgcaaagcatgactgtcaaatttttggagcaggttttctgacttcggtcggaaaacccctctgaattttcttgcagttgaacaacagaggctttttttgtgtgtgtgggggtgcttggttttgggaggttgaagagtacttgttcgcaaactctctaaatgagagatggggaagtgtcttaccagctgattcgcgagagcacctgcaagtttacctgttttagtgatttgcgtttatgaaagttggagttgctgattttgtgatctctacttttaaggtaaaagcagggcggtgttgacttttcttgccagttggctgtcctgttttctttctcgcactgttttctttttgagacgaagtctgtcgctcaggctggagtgcactggcgtgatctcggctcgctgcaaactttgccgaacccctgtttagcgatttccgtttg

SEQ ID NO: 709 - DNA, 1087 bp, synthetic construct
  source 1..1087: mol_type = other DNA
cggtggggctggctcctgtgctgcccgactcctgtgctccgacttggagaagacgggcgtccgttcgtccatacccaaaagagtcggccacaaggatgttggcacctgggggtgggccacgagcggccagttaggggtaagagacggtgcaaggtgacttgtccctggtccttcaccgctccagcactgcgccagtgagaaagtccaacaggccccgggatcgggcggcgaaaggaaggggcgtgatgtcactcctgggtggctgacggggcggggtgtatgcagatgagggtcgcgcaggggctgcggcgtccgcagcggccggggaaacgcgagagatttctcgcgcggcgtgggagagaacgcgggtcgccagatgtcagcggagcgccgagacggcgtgtgcgacgagggagacccgagatcgggcggggctaagtgaccgtgtgttaagagtgcaggggcggcgggtgtgagccggggccgggcgctgggagagcaatgatagggacttagggtgatagaagtgcaaagcatgactgtcaaatttttggagcaggttttctgacttcggtcggaaaacccctatatgtggtaatccaacaatagaaattatttttaagtttgtgtgttcctttttctgttcaatggtgcttttgatattgttgtaaagcagtgactagcagattctgtgtggtaaaagcactgaaccctgtttagttcttttctccctaccttattggtaattatttctgtgtatatatgttccaaagaaatgcggcttgtatattcatgcttttcaactttttgtgatagacagttgatacacaagtagtacctcctccgggatcttcttagtcaagactgtttggtagatgcatgttttttgttacttgtaatgtacagtattcagttcattttctttttgcagcactgtccggttgaaacacaacgcgaggatcgggcgtggtggctcacgcctgtaatcccagcactttgggaggccgaggcaggacaatcaagaccaatcctggtcatcaaggcaggagaatcaagaccatcgaggtcaggagatcaagaccatcct

SEQ ID NO: 710 - DNA, 1085 bp, synthetic construct
  source 1..1085: mol_type = other DNA
cggtggggctggctcctgtgctgcccgactcctgtgctccgacttggagaagacgggcgtccgttcgtccatacccaaaagagtcggccacaaggatgttggcacctgggggtgggccacgagcggccagttaggggtaagagacggtgcaaggtgacttgtccctggtccttcaccgctccagcactgcgccagtgagaaagtccaacaggccccgggatcgggcggcgaaaggaaggggcgtgatgtcactcctgggtggctgacggggcggggtgtatgcagatgagggtcgcgcaggggctgcggcgtccgcagcggccggggaaacgcgagagatttctcgcgcggcgtgggagagaacgcgggtcgccagatgtcagcggagcgccgagacggcgtgtgcgacgagggagacccgagatcgggcggggctaagtgaccgtgtgttaagagtgcaggggcggcgggtgtgagccggggccgggcgctgggagagcaatgatagggacttagggtgatagaagtgcaaagcatgactgtcaaatttttggagcaggttttctgacttcggtcggaaaacccctacatcaggttgtttttctgtttttacatcaggttgtttttctgtttggttttttttttacaccacgtttatacgccggtgcacggtttaccactgaaaacacctttcatctacaggtgatatcttttaacacaaataaaatgtagtagtcctaggagacggaatagaaggaggtggggcctaggcagattcatctctgcggtgcattttgcctctggccctcgggccctagtttgcgatctttcccatcttgcctctgcttccctctgcacaatcctgagtattgcagtaccttacacttaaggaaatttcgtcttgccaaagttgatccatttcagctccgaaacataacaggaactagtgcaacgataaacgtatgaggaacttgcaataagagtgacagaatcctttgaatcaaaaaaaaaaaaagccaccacttaatgagtatctaccatatgtcaagggcttcaccaatatttcattgaaatattccagacca

SEQ ID NO: 711 - DNA, 1087 bp, synthetic construct
  source 1..1087: mol_type = other DNA
cggtggggctggctcctgtgctgcccgactcctgtgctccgacttggagaagacgggcgtccgttcgtccatacccaaaagagtcggccacaaggatgttggcacctgggggtgggccacgagcggccagttaggggtaagagacggtgcaaggtgacttgtccctggtccttcaccgctccagcactgcgccagtgagaaagtccaacaggccccgggatcgggcggcgaaaggaaggggcgtgatgtcactcctgggtggctgacggggcggggtgtatgcagatgagggtcgcgcaggggctgcggcgtccgcagcggccggggaaacgcgagagatttctcgcgcggcgtgggagagaacgcgggtcgccagatgtcagcggagcgccgagacggcgtgtgcgacgagggagacccgagatcgggcggggctaagtgaccgtgtgttaagagtgcaggggcggcgggtgtgagccggggccgggcgctgggagagcaatgatagggacttagggtgatagaagtgcaaagcatgactgtcaaatttttggagcaggttttctgacttcggtcggaaaacccctcttatgatgtttgttgccaatgatagattgttttcactgtgcaaaaattatgggtagttttggtggtcttgatgcagttgtaagcttggggtatgaaggtttgggccacgcctgggcgcttccggctgcgccggatgctgtttcctttccgctcccaggggcgttgggaacggttgtaggacgtggctctttattcgtgagttttccatttacctccgctgaacctagagcttcagacgccctatggcgtccgcctcgacccaaccggcggccttgagcgctgagcaagcaaagggtgagaatcgtcctagtcaaggcataggctgctggcctggggtagtcaaggcatgggctgctggtctggggaggatgcgggcggaggatgtggggcgacaaacctggctacgtccgccgggaaaatggggtaggggacgccgggtaccgtccttctaagtggggcgcttgcccccaagacttgggatcttattgggttacctaca

SEQ ID NO: 712 - DNA, 1085 bp, synthetic construct
  source 1..1085: mol_type = other DNA
cggtggggctggctcctgtgctgcccgactcctgtgctccgacttggagaagacgggcgtccgttcgtccatacccaaaagagtcggccacaaggatgttggcacctgggggtgggccacgagcggccagttaggggtaagagacggtgcaaggtgacttgtccctggtccttcaccgctccagcactgcgccagtgagaaagtccaacaggccccgggatcgggcggcgaaaggaaggggcgtgatgtcactcctgggtggctgacggggcggggtgtatgcagatgagggtcgcgcaggggctgcggcgtccgcagcggccggggaaacgcgagagatttctcgcgcggcgtgggagagaacgcgggtcgccagatgtcagcggagcgccgagacggcgtgtgcgacgagggagacccgagatcgggcggggctaagtgaccgtgtgttaagagtgcaggggcggcgggtgtgagccggggccgggcgctgggagagcaatgatagggacttagggtgatagaagtgcaaagcatgactgtcaaatttttggagcaggttttctgacttcggtcggaaaaccccttctttactgttatatgttaggcgaaatattacgcgtttggagtaagtggtgctttttgtaactgaaaagagattctgtgtgtgtttttttttttttagaggctgcatagttatttgtatgaaccgcaggtgacctaattagcaaggtaattcagacctgtatcctagcacttaagaagtggaagtgggataaccctgcgtgttctcgtgtgggaggctagcttaagcaacaaagcaggaaggccccaccaacaaaagaatttaaaaattatacgtgcgtggtggcgcgcgtatgaggaaattatttggcaactgtgttacagtatagcagcaaatggaatagacctagtccctgactttaggagacctgcctcagccccccgaatggctgggactacaggcgtgcgcctccgcgcccagctaatttttgcatttttggtagagacgggttcaccatgttggccaggatggtctccatctcttcatctggtgatccgcc

SEQ ID NO: 713 - DNA, 1087 bp, synthetic construct
  source 1..1087: mol_type = other DNA
cggtggggctggctcctgtgctgcccgactcctgtgctccgacttggagaagacgggcgtccgttcgtccatacccaaaagagtcggccacaaggatgttggcacctgggggtgggccacgagcggccagttaggggtaagagacggtgcaaggtgacttgtccctggtccttcaccgctccagcactgcgccagtgagaaagtccaacaggccccgggatcgggcggcgaaaggaaggggcgtgatgtcactcctgggtggctgacggggcggggtgtatgcagatgagggtcgcgcaggggctgcggcgtccgcagcggccggggaaacgcgagagatttctcgcgcggcgtgggagagaacgcgggtcgccagatgtcagcggagcgccgagacggcgtgtgcgacgagggagacccgagatcgggcggggctaagtgaccgtgtgttaagagtgcaggggcggcgggtgtgagccggggccgggcgctgggagagcaatgatagggacttagggtgatagaagtgcaaagcatgactgtcaaatttttggagcaggttttctgacttcggtcggaaaacccctaccttattcacgcctaaaaagtagactgactgtggggtggtcgtgttttttgtttcttgttggtaggtggtgaatgcgtttttttcgttgttttctccgttactcaggctgccagttgcttggcagtcttgtcgctggctgtggacgctctgcacttcatcaccgtccccagctgcgctttgagccggtctaaggttgcccacagtattgacgttgggacccacgaaactggcaatttccatgtgtgcggccttacccagttctcccaaacttctgcgtataaccgcttctctgtgcttcagaaagataagtccggccccggcctcacacagcagctcagttcgtgacagcgtttaatatgtaaaatggagcaaataatttatagggcgttgggagagttaaagagactaattcatttacgtgttaaatacagggaatggcttttgcattgatataaccccagcctccagcatgcgccagacctgacgtaggtgttcggc

SEQ ID NO: 714 - DNA, 1087 bp, synthetic construct
  source 1..1087: mol_type = other DNA
cggtggggctggctcctgtgctgcccgactcctgtgctccgacttggagaagacgggcgtccgttcgtccatacccaaaagagtcggccacaaggatgttggcacctgggggtgggccacgagcggccagttaggggtaagagacggtgcaaggtgacttgtccctggtccttcaccgctccagcactgcgccagtgagaaagtccaacaggccccgggatcgggcggcgaaaggaaggggcgtgatgtcactcctgggtggctgacggggcggggtgtatgcagatgagggtcgcgcaggggctgcggcgtccgcagcggccggggaaacgcgagagatttctcgcgcggcgtgggagagaacgcgggtcgccagatgtcagcggagcgccgagacggcgtgtgcgacgagggagacccgagatcgggcggggctaagtgaccgtgtgttaagagtgcaggggcggcgggtgtgagccggggccgggcgctgggagagcaatgatagggacttagggtgatagaagtgcaaagcatgactgtcaaatttttggagcaggttttctgacttcggtcggaaaaccccttttgacccattacccatctaagttagatgcttttttaaatgttttttaatttttaaatttttaatttttttcattatttattttttatttttgagacggatctcggctcactgtaacctccacctcccgggttcaagcgattctcctgactcagcctcccgagtagctgggattacaggcgcgcgccaccatgcccggctaatttttctatttttagtaaagacggggtttcgccatgttgaccagggtggtcttgaactcctgacgtcaggtgatcctcctgcctcgtgctgggattgcaggcgtgagccaccgctcccggcccttagatgctttttaatcagcaagtacgcaatgctttcctgacaggaatgtcaagtccgtcaggaaatccacataagggtgttaagcaggcaaagtaccacatacagattaaaatcaaaagcactgtcaacgcttatttaatttatacagtagaccctaacttttctaattttgtg

SEQ ID NO: 715 - DNA, 1087 bp, synthetic construct
  source 1..1087: mol_type = other DNA
cggtggggctggctcctgtgctgcccgactcctgtgctccgacttggagaagacgggcgtccgttcgtccatacccaaaagagtcggccacaaggatgttggcacctgggggtgggccacgagcggccagttaggggtaagagacggtgcaaggtgacttgtccctggtccttcaccgctccagcactgcgccagtgagaaagtccaacaggccccgggatcgggcggcgaaaggaaggggcgtgatgtcactcctgggtggctgacggggcggggtgtatgcagatgagggtcgcgcaggggctgcggcgtccgcagcggccggggaaacgcgagagatttctcgcgcggcgtgggagagaacgcgggtcgccagatgtcagcggagcgccgagacggcgtgtgcgacgagggagacccgagatcgggcggggctaagtgaccgtgtgttaagagtgcaggggcggcgggtgtgagccggggccgggcgctgggagagcaatgatagggacttagggtgatagaagtgcaaagcatgactgtcaaatttttggagcaggttttctgacttcggtcggaaaacccctgtttacttggttttaaaaatagcttgcactagcgataccgcgaatatggttattaggtttgttaggcacagtcgtgtcttactatagaaaaataacgtagtgttcattttgctgcctgtatgtgttaatttgtccttattgcgccattgttcttgttaagtcttctgtaaggagttgcgggtttcaaactgtcagtctgagagcataagctcacttttcagtcagttgaattgaatgttacattcgattggttctggatattgatattacccaaggcttgtcctgtttgtaagtcttttcctacacctgacaatatgattatgtttacaatgtccctagaactctgggtgtatcgttcccactgaataaaatttgatctctaagttgacctataaatttaagtaccaaaaaactggtttgtaagattttggaaggcagaggcagggaagagaccaacgtggtctacatataaagtaccaggtacatataaagtaccaggt

SEQ ID NO: 716 - DNA, 1083 bp, synthetic construct
  source 1..1083: mol_type = other DNA
cggtggggctggctcctgtgctgcccgactcctgtgctccgacttggagaagacgggcgtccgttcgtccatacccaaaagagtcggccacaaggatgttggcacctgggggtgggccacgagcggccagttaggggtaagagacggtgcaaggtgacttgtccctggtccttcaccgctccagcactgcgccagtgagaaagtccaacaggccccgggatcgggcggcgaaaggaaggggcgtgatgtcactcctgggtggctgacggggcggggtgtatgcagatgagggtcgcgcaggggctgcggcgtccgcagcggccggggaaacgcgagagatttctcgcgcggcgtgggagagaacgcgggtcgccagatgtcagcggagcgccgagacggcgtgtgcgacgagggagacccgagatcgggcggggctaagtgaccgtgtgttaagagtgcaggggcggcgggtgtgagccggggccgggcgctgggagagcaatgatagggacttagggtgatagaagtgcaaagcatgactgtcaaatttttggagcaggttttctgacttcggtcggaaaacccctatttttgtggtgctaaaagttagattgcattccgcccttctcacgtctctttacgtgttgtttgcgaggcgtggcctcggaggtaaatggtctccttttacctcagataagcttacctttgctctgtgagtaagaatgtagctacacttccaaatttagctattgtcctttgcggtccaaatgaaaatattaccttccgatctaacaatgttaaactagtcccaggcccttctatcgattgccagaatagactagactactacacagacacaccctctcaaatcaggccagctcctgcaacctgcacctacagtttgtcccctgggacaaatgaaaggacaggccctctttcccccccccccccaaatcagagcacacacagatcttggggtctggggcagaaatttcgttcatggaaaaaacaaacaaacaaacaaacacgatcaaaggaagctcgttccctttggcctcagggtttcttagacgccgtgttccc

SEQ ID NO: 717 - DNA, 1084 bp, synthetic construct
  source 1..1084: mol_type = other DNA
cggtggggctggctcctgtgctgcccgactcctgtgctccgacttggagaagacgggcgtccgttcgtccatacccaaaagagtcggccacaaggatgttggcacctgggggtgggccacgagcggccagttaggggtaagagacggtgcaaggtgacttgtccctggtccttcaccgctccagcactgcgccagtgagaaagtccaacaggccccgggatcgggcggcgaaaggaaggggcgtgatgtcactcctgggtggctgacggggcggggtgtatgcagatgagggtcgcgcaggggctgcggcgtccgcagcggccggggaaacgcgagagatttctcgcgcggcgtgggagagaacgcgggtcgccagatgtcagcggagcgccgagacggcgtgtgcgacgagggagacccgagatcgggcggggctaagtgaccgtgtgttaagagtgcaggggcggcgggtgtgagccggggccgggcgctgggagagcaatgatagggacttagggtgatagaagtgcaaagcatgactgtcaaatttttggagcaggttttctgacttcggtcggaaaacccctataactggtaaccaaaagcagattactttcccccttgtggtcttcgcgtttgcggacgggagagaactttcggccattttccttttagaaatttaacttcttgaaggccaccaggtgacccttacttccctctcacctttccttctacctgtactttctctattaaaaagcctgcagaagtacccttgacaaattgccaaaaatgacacctaaaaaaaaaaaaaggaaaaacgacaccttaggtaattataggttgtaagaaaaagatttgacctcttggagtttttatttcttaataccaaaggacacccaaggaacgtatctctcaaaattgggtttcaaacctcagccgtttccttcttagttccagtgcttaacacgcaacagacctgcacaccactacactgcatacgagttttaaagttaataaatcagtcacccctccatagtcttctacctacttgaagacagaaacggctgctaggaagcaattcttc

SEQ ID NO: 718 - DNA, 1087 bp, synthetic construct
  source 1..1087: mol_type = other DNA
cggtggggctggctcctgtgctgcccgactcctgtgctccgacttggagaagacgggcgtccgttcgtccatacccaaaagagtcggccacaaggatgttggcacctgggggtgggccacgagcggccagttaggggtaagagacggtgcaaggtgacttgtccctggtccttcaccgctccagcactgcgccagtgagaaagtccaacaggccccgggatcgggcggcgaaaggaaggggcgtgatgtcactcctgggtggctgacggggcggggtgtatgcagatgagggtcgcgcaggggctgcggcgtccgcagcggccggggaaacgcgagagatttctcgcgcggcgtgggagagaacgcgggtcgccagatgtcagcggagcgccgagacggcgtgtgcgacgagggagacccgagatcgggcggggctaagtgaccgtgtgttaagagtgcaggggcggcgggtgtgagccggggccgggcgctgggagagcaatgatagggacttagggtgatagaagtgcaaagcatgactgtcaaatttttggagcaggttttctgacttcggtcggaaaacccctctggggaataagagtggtttaaagaaagaacaatttgagagatctgcttagatctaataaaacccaagtatagtttctttagacgtcttatatctcacgtaggacctcttatttcagactcactgcaagaacaagctaaagaactatatacagtcaggaacaaggtgagccatcgcggttctcagtcccatgatcttaagagtttttcctcttcccctcttccctggctgtcctggagctcactctgtagaccaggctggtctcaaactcagaaatccacttacctctgcctcccaagggctgggattaaaggcatgcaccaccattgcccggcagggtatgtggactatgctgtccttcaactcagagatcgtggtactttaaatctcattttccgaaagaaaagaaaagaaaggaaggggggaaataaagccagtatattttgcacccacaatctgaagttctacaaatattgttagaaaatgcaaaggacccaagtc

SEQ ID NO: 719 - DNA, 1087 bp, synthetic construct
  source 1..1087: mol_type = other DNA
cggtggggctggctcctgtgctgcccgactcctgtgctccgacttggagaagacgggcgtccgttcgtccatacccaaaagagtcggccacaaggatgttggcacctgggggtgggccacgagcggccagttaggggtaagagacggtgcaaggtgacttgtccctggtccttcaccgctccagcactgcgccagtgagaaagtccaacaggccccgggatcgggcggcgaaaggaaggggcgtgatgtcactcctgggtggctgacggggcggggtgtatgcagatgagggtcgcgcaggggctgcggcgtccgcagcggccggggaaacgcgagagatttctcgcgcggcgtgggagagaacgcgggtcgccagatgtcagcggagcgccgagacggcgtgtgcgacgagggagacccgagatcgggcggggctaagtgaccgtgtgttaagagtgcaggggcggcgggtgtgagccggggccgggcgctgggagagcaatgatagggacttagggtgatagaagtgcaaagcatgactgtcaaatttttggagcaggttttctgacttcggtcggaaaacccctctcggtttatcttaaagggttttaaatatagaaagcttccttagtcttatgggtgagagtgctgtttaagccttacctaggtatgtctttgaacatttattacagattgttatttgtgactatgaccactcaggtgttctgttcttgtgaatttagacacactcagaaaggctacacactcaaagaccacaccaaagtgaagtactatctgggccgtgaaactggtcacatatcagttattttgcagtaaaacaaggaagtcaatcatactgcttcagtgggtcagggagtcaagaatgcacagtacaagagctggtgagattcctcagcaggtaagagcactgaatgctcttccaaagattctgagttcaaatcccagcaaccacgtggtggatttgaacaaaggatgaaaacaaccatccataaccagatctgatgccctcttctggagtgtcaaaagacagctatggtgtacttacataaataaataagtaaaaaca

SEQ ID NO: 720 - DNA, 1087 bp, synthetic construct
  source 1..1087: mol_type = other DNA
cggtggggctggctcctgtgctgcccgactcctgtgctccgacttggagaagacgggcgtccgttcgtccatacccaaaagagtcggccacaaggatgttggcacctgggggtgggccacgagcggccagttaggggtaagagacggtgcaaggtgacttgtccctggtccttcaccgctccagcactgcgccagtgagaaagtccaacaggccccgggatcgggcggcgaaaggaaggggcgtgatgtcactcctgggtggctgacggggcggggtgtatgcagatgagggtcgcgcaggggctgcggcgtccgcagcggccggggaaacgcgagagatttctcgcgcggcgtgggagagaacgcgggtcgccagatgtcagcggagcgccgagacggcgtgtgcgacgagggagacccgagatcgggcggggctaagtgaccgtgtgttaagagtgcaggggcggcgggtgtgagccggggccgggcgctgggagagcaatgatagggacttagggtgatagaagtgcaaagcatgactgtcaaatttttggagcaggttttctgacttcggtcggaaaacccctccacattttgtgtttaaaaatagaaatatttaagtgagatcagtttaaatctgctttatctagggtgtctaactgcttgcatctttttaacttttccttatttgtgagaaggtctgtaaaacttattatatgttagtacactgtagctgtcttcagacactccagaagagggattcagatcaccttacagatggttttgagccaccatgtggttgctgggatttgaactcaggacctttagaaaagtagttgggtgctcttacccgctgagccatctcaccagccctttttttttcttttttccagttcgggtttctctgtgtgtagccctggctgtcctggaactcattctgtagaccgggctggcctcgaactcagaaatctgcctgcctctgcctcccaagtgctgggattaaaggaatgtgccttcattgcccggctctagggctttttgttgttgtttgtttgtttgtttgtttgtttgcttttgtggatggcct

SEQ ID NO: 721 - DNA, 1087 bp, synthetic construct
  source 1..1087: mol_type = other DNA
cggtggggctggctcctgtgctgcccgactcctgtgctccgacttggagaagacgggcgtccgttcgtccatacccaaaagagtcggccacaaggatgttggcacctgggggtgggccacgagcggccagttaggggtaagagacggtgcaaggtgacttgtccctggtccttcaccgctccagcactgcgccagtgagaaagtccaacaggccccgggatcgggcggcgaaaggaaggggcgtgatgtcactcctgggtggctgacggggcggggtgtatgcagatgagggtcgcgcaggggctgcggcgtccgcagcggccggggaaacgcgagagatttctcgcgcggcgtgggagagaacgcgggtcgccagatgtcagcggagcgccgagacggcgtgtgcgacgagggagacccgagatcgggcggggctaagtgaccgtgtgttaagagtgcaggggcggcgggtgtgagccggggccgggcgctgggagagcaatgatagggacttagggtgatagaagtgcaaagcatgactgtcaaatttttggagcaggttttctgacttcggtcggaaaacccctaaaaccagtaagggagaaaggtcaagtaacatataaaggaaggcctatcagaattacaccagacttttcaccagagactatgaaagccagaagagcctggacagatgttatacagacactaagagaacacaaatgccagcccaggctactatacctggccaaactctcaattaccatagatggagaaaccaaagtattccacgacaaaaacaaattcacacaatatctttccacgaatccagcccttcaaaggataatgacagaaaagaagcaatacaaggacggaaatcacgccctagaacaaccaagaaactaatcattcaacaaaccaaaaagaagacagccacaagaacagaatgccaactctaacaacaaaaataaaaggaagcaacaattacttttccttaatatctcttaatatcaatggactcaattccccaataaaaagacatagactaacagactggctacacaaacaggacccaacattctgctgctta

SEQ ID NO: 722 - DNA, 1087 bp, synthetic construct
  source 1..1087: mol_type = other DNA
cggtggggctggctcctgtgctgcccgactcctgtgctccgacttggagaagacgggcgtccgttcgtccatacccaaaagagtcggccacaaggatgttggcacctgggggtgggccacgagcggccagttaggggtaagagacggtgcaaggtgacttgtccctggtccttcaccgctccagcactgcgccagtgagaaagtccaacaggccccgggatcgggcggcgaaaggaaggggcgtgatgtcactcctgggtggctgacggggcggggtgtatgcagatgagggtcgcgcaggggctgcggcgtccgcagcggccggggaaacgcgagagatttctcgcgcggcgtgggagagaacgcgggtcgccagatgtcagcggagcgccgagacggcgtgtgcgacgagggagacccgagatcgggcggggctaagtgaccgtgtgttaagagtgcaggggcggcgggtgtgagccggggccgggcgctgggagagcaatgatagggacttagggtgatagaagtgcaaagcatgactgtcaaatttttggagcaggttttctgacttcggtcggaaaacccctcccaatttcactggtctacaatgaaagcaaaacagttctcttccccgctccccggtgtgtgagaggggctttgatccttctctggtttcctaggaaacgcgtatgtgctagagccacgctctgagacttccgcctcgtgcggtcccgcttcctttctgcctcctctggcctgcatccgtgggggaggtggctggctgcagggttctccggatctcttctgtgttcccactactcaagcaccgagtggcgttctatggcgtccgcctcggctcagcccgcggccctgagcgcggagcaggccaagggtgaggaaagagcctagtctgggtgtgggccgtcttctggggggagggcgcgatactattctttgcctctccaagtggggcccttgcccattagggcgaagggttgggaggacaagcttatcgggttgcttgcaggcctcggcccactaattccctgcctcttccctcctctgggctcgcccgccgtcctccgcg

SEQ ID NO: 723 - DNA, 1087 bp, synthetic construct
  source 1..1087: mol_type = other DNA
cggtggggctggctcctgtgctgcccgactcctgtgctccgacttggagaagacgggcgtccgttcgtccatacccaaaagagtcggccacaaggatgttggcacctgggggtgggccacgagcggccagttaggggtaagagacggtgcaaggtgacttgtccctggtccttcaccgctccagcactgcgccagtgagaaagtccaacaggccccgggatcgggcggcgaaaggaaggggcgtgatgtcactcctgggtggctgacggggcggggtgtatgcagatgagggtcgcgcaggggctgcggcgtccgcagcggccggggaaacgcgagagatttctcgcgcggcgtgggagagaacgcgggtcgccagatgtcagcggagcgccgagacggcgtgtgcgacgagggagacccgagatcgggcggggctaagtgaccgtgtgttaagagtgcaggggcggcgggtgtgagccggggccgggcgctgggagagcaatgatagggacttagggtgatagaagtgcaaagcatgactgtcaaatttttggagcaggttttctgacttcggtcggaaaacccctgaatttgttaaattacaggaggaagcttttttagttcattttacaaatactttcttgttaggtagataataccttctaaggttattatctggatcttctaagtctttttatcgctagcaagtctaagtttctggactttggaattagaagttaatgtcgtaggcgggcatggtggtccacgcctttaatcccagagtttgggaggcagacgcaggtggttttctgagttcgaggccatcctgctcttcaatgttagttccaggacagccagggttatacaaagaaaccctgtctcgagaaacaaaacaaacaaaaaaagagtagctgagtgctctgagttgtctctccagccccttagctatttattttcatttaaattatttttgttttattcgcttgtgtgcctgagtttgaatttcccgggattaacagttgaagactagggctggtgagatggctcagcggttaagattgccgactgctcttccaaaggtcctgag

SEQ ID NO: 724 - DNA, 1087 bp, synthetic construct
  source 1..1087: mol_type = other DNA
cggtggggctggctcctgtgctgcccgactcctgtgctccgacttggagaagacgggcgtccgttcgtccatacccaaaagagtcggccacaaggatgttggcacctgggggtgggccacgagcggccagttaggggtaagagacggtgcaaggtgacttgtccctggtccttcaccgctccagcactgcgccagtgagaaagtccaacaggccccgggatcgggcggcgaaaggaaggggcgtgatgtcactcctgggtggctgacggggcggggtgtatgcagatgagggtcgcgcaggggctgcggcgtccgcagcggccggggaaacgcgagagatttctcgcgcggcgtgggagagaacgcgggtcgccagatgtcagcggagcgccgagacggcgtgtgcgacgagggagacccgagatcgggcggggctaagtgaccgtgtgttaagagtgcaggggcggcgggtgtgagccggggccgggcgctgggagagcaatgatagggacttagggtgatagaagtgcaaagcatgactgtcaaatttttggagcaggttttctgacttcggtcggaaaacccctaccccctaattctacaagaatagaaagcttagcagctcctctgaatggttgctctcaggtgctagtggttgcaagtcgtatgttgatgcctgcctttgccctacctggtgtgtgagcgtgagcgcgccccacctctccagcctctctcttactgtttttcagacaagatgggactgttgttctcctactgctatgtacctcaatttcaattgatcatgcctggacataactgcccatgttgtaaggtcgtctacgttgtaaggtcgtgctcagtttctgatgcctagactagtcacctttccgtttgcctcctgactgtgtaaatgaggcaaatgaaggtggtctcttaactgacatgttagtgtttgacctatgggatagtttctcattgttgagacagaatttctagaagctggtccgctgagcggctaagagcacttgctgatattgcaaaggatctacctgggtttggttctcagcactcacatggaagttcacat

SEQ ID NO: 725 - DNA, 654 bp, synthetic construct
  source 1..654: mol_type = other DNA
cggtggggctggctcctgtgctgcccgactcctgtgctccgacttggagaagacgggcgtccgttcgtccatacccaaaagagtcggccacaaggatgttggcacctgggggtgggccacgagcggccagttaggggtaagagacggtgcaaggtgacttgtccctggtccttcaccgctccagcactgcgccagtgagaaagtccaacaggccccgggatcgggcggcgaaaggaaggggcgtgatgtcactcctgggtggctgacggggcggggtgtatgcagatgagggtcgcgcaggggctgcggcgtccgcagcggccggggaaacgcgagagatttctcgcgcggcgtgggagagaacgcgggtcgccagatgtcagcggagcgccgagacggcgtgtgcgacgagggagacccgagatcgggcggggctaagtgaccgtgtgttaagagtgcaggggcggcgggtgtgagccggggccgggcgctgggagagcaatgatagggacttagggtgatagaagtgcaaagcatgactgtcaaatttttggagcaggttttctgacttcggtcggaaaaccccttgtagttcctgcaatttaattttcgtttaaaactttattttattctttaacttaaaaaaaatatata

SEQ ID NO: 726 - DNA, 1087 bp, synthetic construct
  source 1..1087: mol_type = other DNA
gctcctcctaggagctaacactggagccagggggatcaaagctgtgtagtgagtgtcacaaaacatcctagcactaaggagactgagacgggaacattgtagtaagttctagcctgggctacagtaagagacgtagtctcaaacaaggaaatgcgctataaataaataagatggagcttcaatggtctgtgcataactggggggttgaaggagccttccaaaggctgggttccggctccgttcagtcgttgacttgagctgggcggggcatgcaaataaggacgccgcctggtctccgcggaactctgggaacgaaaagcgcaacaaaatcctctcggcccccttggattcctcgggctttccctggcgtaaaggtggtggacaggatagaagaggagtttcggcgtcgggcgcgtgtttgcggtcgcgcgagtgttggcgaccgtgagttgaaggtgtgtgtggtgttgagtgtatggggcgtgtgggcgcagttcggtaatgatagggacttagggtgatagaagtgcaaagcatgactgtcaaatttttggagcaggttttctgacttcggtcggaaaacccctactttctggagtttcaaaaacagactgtacgccaagggtcatatctttttttgtattggtttgtgtcttggttggtgtcttaggtgttaatcctacagtggagggtttatgggaataggaagtaacatgtcgcctgcatgtcataggagaaaaagcgagcatcagccgtatcggctttgtaacacaaattagctatcgtgaagtccgctcagctcttccctttctaccctggctgctttttgcagggattggtccgtggtctccagtctcttgggttctcaccctgtgtgaaaatcttcgtgtttttccctaccccccagtcacctcttacacagcctctgcttccaagcgcagcccccacaggagtttgtaggatttctgtgctagcggggaatgtgttctcacctcatagagccaggtagaaattatgcagatgggcagttctctgggaagaaagcagggcctttggggctctcagtgtccccgttgggttgtagaca

SEQ ID NO: 727 - DNA, 1087 bp, synthetic construct
  source 1..1087: mol_type = other DNA
gctcctcctaggagctaacactggagccagggggatcaaagctgtgtagtgagtgtcacaaaacatcctagcactaaggagactgagacgggaacattgtagtaagttctagcctgggctacagtaagagacgtagtctcaaacaaggaaatgcgctataaataaataagatggagcttcaatggtctgtgcataactggggggttgaaggagccttccaaaggctgggttccggctccgttcagtcgttgacttgagctgggcggggcatgcaaataaggacgccgcctggtctccgcggaactctgggaacgaaaagcgcaacaaaatcctctcggcccccttggattcctcgggctttccctggcgtaaaggtggtggacaggatagaagaggagtttcggcgtcgggcgcgtgtttgcggtcgcgcgagtgttggcgaccgtgagttgaaggtgtgtgtggtgttgagtgtatggggcgtgtgggcgcagttcggtaatgatagggacttagggtgatagaagtgcaaagcatgactgtcaaatttttggagcaggttttctgacttcggtcggaaaacccctactttctggagtttctaaaagtagactgtacgctaagggtcatatctttttttgttttggtttgtgtcttggttggcgtcttaaatgttaatcctacagtggagggctggcgaataggaagtaacatgtcgcctgcacgccataggagaaaaagcgagcatcagccgtatcggctttgtaacacaaattagctatcgtgaagtccgctcagctcttccctttctaccctggctgctttttgcagggattggtccgtggtctccagtctcttgggttctcaccctgtgtgaaaatcttcctgtttttccctaccccccaagtcacctcttacacagcctctgcttccaagcgcagcccccacaggagtttgtaggatttctgtgctagcggggagtgtgttctcacctcatagagccaggtagaaactacgcagatgggtgctgttctccaggaagaaagcagggcctttggggctctcagtgtccccgttgggttgtaga

SEQ ID NO: 728 - DNA, 1087 bp, synthetic construct
  source 1..1087: mol_type = other DNA
gctcctcctaggagctaacactggagccagggggatcaaagctgtgtagtgagtgtcacaaaacatcctagcactaaggagactgagacgggaacattgtagtaagttctagcctgggctacagtaagagacgtagtctcaaacaaggaaatgcgctataaataaataagatggagcttcaatggtctgtgcataactggggggttgaaggagccttccaaaggctgggttccggctccgttcagtcgttgacttgagctgggcggggcatgcaaataaggacgccgcctggtctccgcggaactctgggaacgaaaagcgcaacaaaatcctctcggcccccttggattcctcgggctttccctggcgtaaaggtggtggacaggatagaagaggagtttcggcgtcgggcgcgtgtttgcggtcgcgcgagtgttggcgaccgtgagttgaaggtgtgtgtggtgttgagtgtatggggcgtgtgggcgcagttcggtaatgatagggacttagggtgatagaagtgcaaagcatgactgtcaaatttttggagcaggttttctgacttcggtcggaaaacccctactttctggagtttcaaaaacagaccgtacgccaagggtcatgtcttttttcgtattggtttgtgtcttagttgttaatcctacagtggaggcctggggaataagaagtaacatgtggcctgcacgccataggagaaaaagcgagcatcagccgtatcggctttgtaacacaaattagctatcgtgaagtccgctcagctcttccatttctaccctggctgctttttgcagggattggtccgtggtctccagtctcttgggttctcaccctgtgtgaaaatcttcgtgtttttccctaccccccaagtcacctcttacacagcctctgcttccaagcgcagcccccacaggagtttgtaggatttctgtgctagcggggagtgtgttctcacctcatagagccaggtagaaattatgcagatgggcgctgttctctgggaagaaagcagggcctttggggctctcagtgtccccgttgggttgtagacataacactctta

SEQ ID NO: 729 - DNA, 891 bp, synthetic construct
  source 1..891: mol_type = other DNA
gctcctcctaggagctaacactggagccagggggatcaaagctgtgtagtgagtgtcacaaaacatcctagcactaaggagactgagacgggaacattgtagtaagttctagcctgggctacagtaagagacgtagtctcaaacaaggaaatgcgctataaataaataagatggagcttcaatggtctgtgcataactggggggttgaaggagccttccaaaggctgggttccggctccgttcagtcgttgacttgagctgggcggggcatgcaaataaggacgccgcctggtctccgcggaactctgggaacgaaaagcgcaacaaaatcctctcggcccccttggattcctcgggctttccctggcgtaaaggtggtggacaggatagaagaggagtttcggcgtcgggcgcgtgtttgcggtcgcgcgagtgttggcgaccgtgagttgaaggtgtgtgtggtgttgagtgtatggggcgtgtgggcgcagttcggtaatgatagggacttagggtgatagaagtgcaaagcatgactgtcaaatttttggagcaggttttctgacttcggtcggaaaacccctcctccggggatacaacgtgtttcctaaaagtagagggaggtaagagacggtagcacctgcggggcggcttgcacgccgagtgcctgtgacgcgccggcttaacttaactgcttccctgaagtaccttgaggttcctgatgtgcgggcggtagacggtaggcttatgcggcacgctgtcgtttccaccgtggctactgcgctttgggaaggccacgacctcctcctttggggaggtccttaggatctcagcttggcagtcgagtgggtggcgaccttttaaaggaatgggacccacccggagttc

SEQ ID NO: 730 - DNA, 1079 bp, synthetic construct
  source 1..1079: mol_type = other DNA
gctcctcctaggagctaacactggagccagggggatcaaagctgtgtagtgagtgtcacaaaacatcctagcactaaggagactgagacgggaacattgtagtaagttctagcctgggctacagtaagagacgtagtctcaaacaaggaaatgcgctataaataaataagatggagcttcaatggtctgtgcataactggggggttgaaggagccttccaaaggctgggttccggctccgttcagtcgttgacttgagctgggcggggcatgcaaataaggacgccgcctggtctccgcggaactctgggaacgaaaagcgcaacaaaatcctctcggcccccttggattcctcgggctttccctggcgtaaaggtggtggacaggatagaagaggagtttcggcgtcgggcgcgtgtttgcggtcgcgcgagtgttggcgaccgtgagttgaaggtgtgtgtggtgttgagtgtatggggcgtgtgggcgcagttcggtaatgatagggacttagggtgatagaagtgcaaagcatgactgtcaaatttttggagcaggttttctgacttcggtcggaaaacccctttcccttcttgtaatacaaaataataacaaccacagaggacatcgcaagtaaaatgtgtataacaaccccatctaaagaaccctatcatctttctactatctgtctacctaaatatgtatagtataaataaccctatatagcactctaagcaacttaagttaggtaacttagaaaactcttttttttttttgagactgagtctcactctgtcgcacccaggctggagtgcagtggcgtgatctcggctcactgcaacctccaccttctgggttcaagtgattctcccatctcagtctcccaagtagctgggattacaggcacgccaccatgccctgctacatttttttttttttagtagagatgaggtttcaccacattggccaggctgttctcgaactcctgacctcaggtgatccgcccaccttggcctcatgaagtgctgggattacaggtgtgagccactgtacccagccagaaaactcttaaaaaac

SEQ ID NO: 731 - DNA, 969 bp, synthetic construct
  source 1..969: mol_type = other DNA
gctcctcctaggagctaacactggagccagggggatcaaagctgtgtagtgagtgtcacaaaacatcctagcactaaggagactgagacgggaacattgtagtaagttctagcctgggctacagtaagagacgtagtctcaaacaaggaaatgcgctataaataaataagatggagcttcaatggtctgtgcataactggggggttgaaggagccttccaaaggctgggttccggctccgttcagtcgttgacttgagctgggcggggcatgcaaataaggacgccgcctggtctccgcggaactctgggaacgaaaagcgcaacaaaatcctctcggcccccttggattcctcgggctttccctggcgtaaaggtggtggacaggatagaagaggagtttcggcgtcgggcgcgtgtttgcggtcgcgcgagtgttggcgaccgtgagttgaaggtgtgtgtggtgttgagtgtatggggcgtgtgggcgcagttcggtaatgatagggacttagggtgatagaagtgcaaagcatgactgtcaaatttttggagcaggttttctgacttcggtcggaaaacccctctgaattttcttgcagttgaacaacagaggctttttttgtgtgtgtgggggtgcttggttttgggaggttgaagagtacttgttcgcaaactctctaaatgagagatggggaagtgtcttaccagctgattcgcgagagcacctgcaagtttacctgttttagtgatttgcgtttatgaaagttggagttgctgattttgtgatctctacttttaaggtaaaagcagggcggtgttgacttttcttgccagttggctgtcctgttttctttctcgcactgttttctttttgagacgaagtctgtcgctcaggctggagtgcactggcgtgatctcggctcgctgcaaactttgccgaacccctgtttagcgatttccgtttg

SEQ ID NO: 732 - DNA, 1087 bp, synthetic construct
  source 1..1087: mol_type = other DNA
gctcctcctaggagctaacactggagccagggggatcaaagctgtgtagtgagtgtcacaaaacatcctagcactaaggagactgagacgggaacattgtagtaagttctagcctgggctacagtaagagacgtagtctcaaacaaggaaatgcgctataaataaataagatggagcttcaatggtctgtgcataactggggggttgaaggagccttccaaaggctgggttccggctccgttcagtcgttgacttgagctgggcggggcatgcaaataaggacgccgcctggtctccgcggaactctgggaacgaaaagcgcaacaaaatcctctcggcccccttggattcctcgggctttccctggcgtaaaggtggtggacaggatagaagaggagtttcggcgtcgggcgcgtgtttgcggtcgcgcgagtgttggcgaccgtgagttgaaggtgtgtgtggtgttgagtgtatggggcgtgtgggcgcagttcggtaatgatagggacttagggtgatagaagtgcaaagcatgactgtcaaatttttggagcaggttttctgacttcggtcggaaaacccctatatgtggtaatccaacaatagaaattatttttaagtttgtgtgttcctttttctgttcaatggtgcttttgatattgttgtaaagcagtgactagcagattctgtgtggtaaaagcactgaaccctgtttagttcttttctccctaccttattggtaattatttctgtgtatatatgttccaaagaaatgcggcttgtatattcatgcttttcaactttttgtgatagacagttgatacacaagtagtacctcctccgggatcttcttagtcaagactgtttggtagatgcatgttttttgttacttgtaatgtacagtattcagttcattttctttttgcagcactgtccggttgaaacacaacgcgaggatcgggcgtggtggctcacgcctgtaatcccagcactttgggaggccgaggcaggacaatcaagaccaatcctggtcatcaaggcaggagaatcaagaccatcgaggtcaggagatcaagaccatcct

SEQ ID NO: 733 - DNA, 1085 bp, synthetic construct
  source 1..1085: mol_type = other DNA
gctcctcctaggagctaacactggagccagggggatcaaagctgtgtagtgagtgtcacaaaacatcctagcactaaggagactgagacgggaacattgtagtaagttctagcctgggctacagtaagagacgtagtctcaaacaaggaaatgcgctataaataaataagatggagcttcaatggtctgtgcataactggggggttgaaggagccttccaaaggctgggttccggctccgttcagtcgttgacttgagctgggcggggcatgcaaataaggacgccgcctggtctccgcggaactctgggaacgaaaagcgcaacaaaatcctctcggcccccttggattcctcgggctttccctggcgtaaaggtggtggacaggatagaagaggagtttcggcgtcgggcgcgtgtttgcggtcgcgcgagtgttggcgaccgtgagttgaaggtgtgtgtggtgttgagtgtatggggcgtgtgggcgcagttcggtaatgatagggacttagggtgatagaagtgcaaagcatgactgtcaaatttttggagcaggttttctgacttcggtcggaaaacccctacatcaggttgtttttctgtttttacatcaggttgtttttctgtttggttttttttttacaccacgtttatacgccggtgcacggtttaccactgaaaacacctttcatctacaggtgatatcttttaacacaaataaaatgtagtagtcctaggagacggaatagaaggaggtggggcctaggcagattcatctctgcggtgcattttgcctctggccctcgggccctagtttgcgatctttcccatcttgcctctgcttccctctgcacaatcctgagtattgcagtaccttacacttaaggaaatttcgtcttgccaaagttgatccatttcagctccgaaacataacaggaactagtgcaacgataaacgtatgaggaacttgcaataagagtgacagaatcctttgaatcaaaaaaaaaaaaagccaccacttaatgagtatctaccatatgtcaagggcttcaccaatatttcattgaaatattccagacca

SEQ ID NO: 734 - DNA, 1087 bp, synthetic construct
  source 1..1087: mol_type = other DNA
gctcctcctaggagctaacactggagccagggggatcaaagctgtgtagtgagtgtcacaaaacatcctagcactaaggagactgagacgggaacattgtagtaagttctagcctgggctacagtaagagacgtagtctcaaacaaggaaatgcgctataaataaataagatggagcttcaatggtctgtgcataactggggggttgaaggagccttccaaaggctgggttccggctccgttcagtcgttgacttgagctgggcggggcatgcaaataaggacgccgcctggtctccgcggaactctgggaacgaaaagcgcaacaaaatcctctcggcccccttggattcctcgggctttccctggcgtaaaggtggtggacaggatagaagaggagtttcggcgtcgggcgcgtgtttgcggtcgcgcgagtgttggcgaccgtgagttgaaggtgtgtgtggtgttgagtgtatggggcgtgtgggcgcagttcggtaatgatagggacttagggtgatagaagtgcaaagcatgactgtcaaatttttggagcaggttttctgacttcggtcggaaaacccctcttatgatgtttgttgccaatgatagattgttttcactgtgcaaaaattatgggtagttttggtggtcttgatgcagttgtaagcttggggtatgaaggtttgggccacgcctgggcgcttccggctgcgccggatgctgtttcctttccgctcccaggggcgttgggaacggttgtaggacgtggctctttattcgtgagttttccatttacctccgctgaacctagagcttcagacgccctatggcgtccgcctcgacccaaccggcggccttgagcgctgagcaagcaaagggtgagaatcgtcctagtcaaggcataggctgctggcctggggtagtcaaggcatgggctgctggtctggggaggatgcgggcggaggatgtggggcgacaaacctggctacgtccgccgggaaaatggggtaggggacgccgggtaccgtccttctaagtggggcgcttgcccccaagacttgggatcttattgggttacctaca

SEQ ID NO: 735 - DNA, 1085 bp, synthetic construct
  source 1..1085: mol_type = other DNA
gctcctcctaggagctaacactggagccagggggatcaaagctgtgtagtgagtgtcacaaaacatcctagcactaaggagactgagacgggaacattgtagtaagttctagcctgggctacagtaagagacgtagtctcaaacaaggaaatgcgctataaataaataagatggagcttcaatggtctgtgcataactggggggttgaaggagccttccaaaggctgggttccggctccgttcagtcgttgacttgagctgggcggggcatgcaaataaggacgccgcctggtctccgcggaactctgggaacgaaaagcgcaacaaaatcctctcggcccccttggattcctcgggctttccctggcgtaaaggtggtggacaggatagaagaggagtttcggcgtcgggcgcgtgtttgcggtcgcgcgagtgttggcgaccgtgagttgaaggtgtgtgtggtgttgagtgtatggggcgtgtgggcgcagttcggtaatgatagggacttagggtgatagaagtgcaaagcatgactgtcaaatttttggagcaggttttctgacttcggtcggaaaaccccttctttactgttatatgttaggcgaaatattacgcgtttggagtaagtggtgctttttgtaactgaaaagagattctgtgtgtgtttttttttttttagaggctgcatagttatttgtatgaaccgcaggtgacctaattagcaaggtaattcagacctgtatcctagcacttaagaagtggaagtgggataaccctgcgtgttctcgtgtgggaggctagcttaagcaacaaagcaggaaggccccaccaacaaaagaatttaaaaattatacgtgcgtggtggcgcgcgtatgaggaaattatttggcaactgtgttacagtatagcagcaaatggaatagacctagtccctgactttaggagacctgcctcagccccccgaatggctgggactacaggcgtgcgcctccgcgcccagctaatttttgcatttttggtagagacgggttcaccatgttggccaggatggtctccatctcttcatctggtgatccgcc

SEQ ID NO: 736 - DNA, 1087 bp, synthetic construct
  source 1..1087: mol_type = other DNA
gctcctcctaggagctaacactggagccagggggatcaaagctgtgtagtgagtgtcacaaaacatcctagcactaaggagactgagacgggaacattgtagtaagttctagcctgggctacagtaagagacgtagtctcaaacaaggaaatgcgctataaataaataagatggagcttcaatggtctgtgcataactggggggttgaaggagccttccaaaggctgggttccggctccgttcagtcgttgacttgagctgggcggggcatgcaaataaggacgccgcctggtctccgcggaactctgggaacgaaaagcgcaacaaaatcctctcggcccccttggattcctcgggctttccctggcgtaaaggtggtggacaggatagaagaggagtttcggcgtcgggcgcgtgtttgcggtcgcgcgagtgttggcgaccgtgagttgaaggtgtgtgtggtgttgagtgtatggggcgtgtgggcgcagttcggtaatgatagggacttagggtgatagaagtgcaaagcatgactgtcaaatttttggagcaggttttctgacttcggtcggaaaacccctaccttattcacgcctaaaaagtagactgactgtggggtggtcgtgttttttgtttcttgttggtaggtggtgaatgcgtttttttcgttgttttctccgttactcaggctgccagttgcttggcagtcttgtcgctggctgtggacgctctgcacttcatcaccgtccccagctgcgctttgagccggtctaaggttgcccacagtattgacgttgggacccacgaaactggcaatttccatgtgtgcggccttacccagttctcccaaacttctgcgtataaccgcttctctgtgcttcagaaagataagtccggccccggcctcacacagcagctcagttcgtgacagcgtttaatatgtaaaatggagcaaataatttatagggcgttgggagagttaaagagactaattcatttacgtgttaaatacagggaatggcttttgcattgatataaccccagcctccagcatgcgccagacctgacgtaggtgttcggc

SEQ ID NO: 737 - DNA, 1087 bp, synthetic construct
  source 1..1087: mol_type = other DNA
gctcctcctaggagctaacactggagccagggggatcaaagctgtgtagtgagtgtcacaaaacatcctagcactaaggagactgagacgggaacattgtagtaagttctagcctgggctacagtaagagacgtagtctcaaacaaggaaatgcgctataaataaataagatggagcttcaatggtctgtgcataactggggggttgaaggagccttccaaaggctgggttccggctccgttcagtcgttgacttgagctgggcggggcatgcaaataaggacgccgcctggtctccgcggaactctgggaacgaaaagcgcaacaaaatcctctcggcccccttggattcctcgggctttccctggcgtaaaggtggtggacaggatagaagaggagtttcggcgtcgggcgcgtgtttgcggtcgcgcgagtgttggcgaccgtgagttgaaggtgtgtgtggtgttgagtgtatggggcgtgtgggcgcagttcggtaatgatagggacttagggtgatagaagtgcaaagcatgactgtcaaatttttggagcaggttttctgacttcggtcggaaaaccccttttgacccattacccatctaagttagatgcttttttaaatgttttttaatttttaaatttttaatttttttcattatttattttttatttttgagacggatctcggctcactgtaacctccacctcccgggttcaagcgattctcctgactcagcctcccgagtagctgggattacaggcgcgcgccaccatgcccggctaatttttctatttttagtaaagacggggtttcgccatgttgaccagggtggtcttgaactcctgacgtcaggtgatcctcctgcctcgtgctgggattgcaggcgtgagccaccgctcccggcccttagatgctttttaatcagcaagtacgcaatgctttcctgacaggaatgtcaagtccgtcaggaaatccacataagggtgttaagcaggcaaagtaccacatacagattaaaatcaaaagcactgtcaacgcttatttaatttatacagtagaccctaacttttctaattttgtg

SEQ ID NO: 738 - DNA, 1087 bp, synthetic construct
  source 1..1087: mol_type = other DNA
gctcctcctaggagctaacactggagccagggggatcaaagctgtgtagtgagtgtcacaaaacatcctagcactaaggagactgagacgggaacattgtagtaagttctagcctgggctacagtaagagacgtagtctcaaacaaggaaatgcgctataaataaataagatggagcttcaatggtctgtgcataactggggggttgaaggagccttccaaaggctgggttccggctccgttcagtcgttgacttgagctgggcggggcatgcaaataaggacgccgcctggtctccgcggaactctgggaacgaaaagcgcaacaaaatcctctcggcccccttggattcctcgggctttccctggcgtaaaggtggtggacaggatagaagaggagtttcggcgtcgggcgcgtgtttgcggtcgcgcgagtgttggcgaccgtgagttgaaggtgtgtgtggtgttgagtgtatggggcgtgtgggcgcagttcggtaatgatagggacttagggtgatagaagtgcaaagcatgactgtcaaatttttggagcaggttttctgacttcggtcggaaaacccctgtttacttggttttaaaaatagcttgcactagcgataccgcgaatatggttattaggtttgttaggcacagtcgtgtcttactatagaaaaataacgtagtgttcattttgctgcctgtatgtgttaatttgtccttattgcgccattgttcttgttaagtcttctgtaaggagttgcgggtttcaaactgtcagtctgagagcataagctcacttttcagtcagttgaattgaatgttacattcgattggttctggatattgatattacccaaggcttgtcctgtttgtaagtcttttcctacacctgacaatatgattatgtttacaatgtccctagaactctgggtgtatcgttcccactgaataaaatttgatctctaagttgacctataaatttaagtaccaaaaaactggtttgtaagattttggaaggcagaggcagggaagagaccaacgtggtctacatataaagtaccaggtacatataaagtaccaggt

SEQ ID NO: 739 - DNA, 1083 bp, synthetic construct
  source 1..1083: mol_type = other DNA
gctcctcctaggagctaacactggagccagggggatcaaagctgtgtagtgagtgtcacaaaacatcctagcactaaggagactgagacgggaacattgtagtaagttctagcctgggctacagtaagagacgtagtctcaaacaaggaaatgcgctataaataaataagatggagcttcaatggtctgtgcataactggggggttgaaggagccttccaaaggctgggttccggctccgttcagtcgttgacttgagctgggcggggcatgcaaataaggacgccgcctggtctccgcggaactctgggaacgaaaagcgcaacaaaatcctctcggcccccttggattcctcgggctttccctggcgtaaaggtggtggacaggatagaagaggagtttcggcgtcgggcgcgtgtttgcggtcgcgcgagtgttggcgaccgtgagttgaaggtgtgtgtggtgttgagtgtatggggcgtgtgggcgcagttcggtaatgatagggacttagggtgatagaagtgcaaagcatgactgtcaaatttttggagcaggttttctgacttcggtcggaaaacccctatttttgtggtgctaaaagttagattgcattccgcccttctcacgtctctttacgtgttgtttgcgaggcgtggcctcggaggtaaatggtctccttttacctcagataagcttacctttgctctgtgagtaagaatgtagctacacttccaaatttagctattgtcctttgcggtccaaatgaaaatattaccttccgatctaacaatgttaaactagtcccaggcccttctatcgattgccagaatagactagactactacacagacacaccctctcaaatcaggccagctcctgcaacctgcacctacagtttgtcccctgggacaaatgaaaggacaggccctctttcccccccccccccaaatcagagcacacacagatcttggggtctggggcagaaatttcgttcatggaaaaaacaaacaaacaaacaaacacgatcaaaggaagctcgttccctttggcctcagggtttcttagacgccgtgttccc

SEQ ID NO: 740 - DNA, 1084 bp, synthetic construct
  source 1..1084: mol_type = other DNA
gctcctcctaggagctaacactggagccagggggatcaaagctgtgtagtgagtgtcacaaaacatcctagcactaaggagactgagacgggaacattgtagtaagttctagcctgggctacagtaagagacgtagtctcaaacaaggaaatgcgctataaataaataagatggagcttcaatggtctgtgcataactggggggttgaaggagccttccaaaggctgggttccggctccgttcagtcgttgacttgagctgggcggggcatgcaaataaggacgccgcctggtctccgcggaactctgggaacgaaaagcgcaacaaaatcctctcggcccccttggattcctcgggctttccctggcgtaaaggtggtggacaggatagaagaggagtttcggcgtcgggcgcgtgtttgcggtcgcgcgagtgttggcgaccgtgagttgaaggtgtgtgtggtgttgagtgtatggggcgtgtgggcgcagttcggtaatgatagggacttagggtgatagaagtgcaaagcatgactgtcaaatttttggagcaggttttctgacttcggtcggaaaacccctataactggtaaccaaaagcagattactttcccccttgtggtcttcgcgtttgcggacgggagagaactttcggccattttccttttagaaatttaacttcttgaaggccaccaggtgacccttacttccctctcacctttccttctacctgtactttctctattaaaaagcctgcagaagtacccttgacaaattgccaaaaatgacacctaaaaaaaaaaaaaggaaaaacgacaccttaggtaattataggttgtaagaaaaagatttgacctcttggagtttttatttcttaataccaaaggacacccaaggaacgtatctctcaaaattgggtttcaaacctcagccgtttccttcttagttccagtgcttaacacgcaacagacctgcacaccactacactgcatacgagttttaaagttaataaatcagtcacccctccatagtcttctacctacttgaagacagaaacggctgctaggaagcaattcttc

SEQ ID NO: 741 - DNA, 1087 bp, synthetic construct
  source 1..1087: mol_type = other DNA
gctcctcctaggagctaacactggagccagggggatcaaagctgtgtagtgagtgtcacaaaacatcctagcactaaggagactgagacgggaacattgtagtaagttctagcctgggctacagtaagagacgtagtctcaaacaaggaaatgcgctataaataaataagatggagcttcaatggtctgtgcataactggggggttgaaggagccttccaaaggctgggttccggctccgttcagtcgttgacttgagctgggcggggcatgcaaataaggacgccgcctggtctccgcggaactctgggaacgaaaagcgcaacaaaatcctctcggcccccttggattcctcgggctttccctggcgtaaaggtggtggacaggatagaagaggagtttcggcgtcgggcgcgtgtttgcggtcgcgcgagtgttggcgaccgtgagttgaaggtgtgtgtggtgttgagtgtatggggcgtgtgggcgcagttcggtaatgatagggacttagggtgatagaagtgcaaagcatgactgtcaaatttttggagcaggttttctgacttcggtcggaaaacccctctggggaataagagtggtttaaagaaagaacaatttgagagatctgcttagatctaataaaacccaagtatagtttctttagacgtcttatatctcacgtaggacctcttatttcagactcactgcaagaacaagctaaagaactatatacagtcaggaacaaggtgagccatcgcggttctcagtcccatgatcttaagagtttttcctcttcccctcttccctggctgtcctggagctcactctgtagaccaggctggtctcaaactcagaaatccacttacctctgcctcccaagggctgggattaaaggcatgcaccaccattgcccggcagggtatgtggactatgctgtccttcaactcagagatcgtggtactttaaatctcattttccgaaagaaaagaaaagaaaggaaggggggaaataaagccagtatattttgcacccacaatctgaagttctacaaatattgttagaaaatgcaaaggacccaagtc

SEQ ID NO: 742 - DNA, 1087 bp, synthetic construct
  source 1..1087: mol_type = other DNA
gctcctcctaggagctaacactggagccagggggatcaaagctgtgtagtgagtgtcacaaaacatcctagcactaaggagactgagacgggaacattgtagtaagttctagcctgggctacagtaagagacgtagtctcaaacaaggaaatgcgctataaataaataagatggagcttcaatggtctgtgcataactggggggttgaaggagccttccaaaggctgggttccggctccgttcagtcgttgacttgagctgggcggggcatgcaaataaggacgccgcctggtctccgcggaactctgggaacgaaaagcgcaacaaaatcctctcggcccccttggattcctcgggctttccctggcgtaaaggtggtggacaggatagaagaggagtttcggcgtcgggcgcgtgtttgcggtcgcgcgagtgttggcgaccgtgagttgaaggtgtgtgtggtgttgagtgtatggggcgtgtgggcgcagttcggtaatgatagggacttagggtgatagaagtgcaaagcatgactgtcaaatttttggagcaggttttctgacttcggtcggaaaacccctctcggtttatcttaaagggttttaaatatagaaagcttccttagtcttatgggtgagagtgctgtttaagccttacctaggtatgtctttgaacatttattacagattgttatttgtgactatgaccactcaggtgttctgttcttgtgaatttagacacactcagaaaggctacacactcaaagaccacaccaaagtgaagtactatctgggccgtgaaactggtcacatatcagttattttgcagtaaaacaaggaagtcaatcatactgcttcagtgggtcagggagtcaagaatgcacagtacaagagctggtgagattcctcagcaggtaagagcactgaatgctcttccaaagattctgagttcaaatcccagcaaccacgtggtggatttgaacaaaggatgaaaacaaccatccataaccagatctgatgccctcttctggagtgtcaaaagacagctatggtgtacttacataaataaataagtaaaaaca

SEQ ID NO: 743 - DNA, 1087 bp, synthetic construct
  source 1..1087: mol_type = other DNA
gctcctcctaggagctaacactggagccagggggatcaaagctgtgtagtgagtgtcacaaaacatcctagcactaaggagactgagacgggaacattgtagtaagttctagcctgggctacagtaagagacgtagtctcaaacaaggaaatgcgctataaataaataagatggagcttcaatggtctgtgcataactggggggttgaaggagccttccaaaggctgggttccggctccgttcagtcgttgacttgagctgggcggggcatgcaaataaggacgccgcctggtctccgcggaactctgggaacgaaaagcgcaacaaaatcctctcggcccccttggattcctcgggctttccctggcgtaaaggtggtggacaggatagaagaggagtttcggcgtcgggcgcgtgtttgcggtcgcgcgagtgttggcgaccgtgagttgaaggtgtgtgtggtgttgagtgtatggggcgtgtgggcgcagttcggtaatgatagggacttagggtgatagaagtgcaaagcatgactgtcaaatttttggagcaggttttctgacttcggtcggaaaacccctccacattttgtgtttaaaaatagaaatatttaagtgagatcagtttaaatctgctttatctagggtgtctaactgcttgcatctttttaacttttccttatttgtgagaaggtctgtaaaacttattatatgttagtacactgtagctgtcttcagacactccagaagagggattcagatcaccttacagatggttttgagccaccatgtggttgctgggatttgaactcaggacctttagaaaagtagttgggtgctcttacccgctgagccatctcaccagccctttttttttcttttttccagttcgggtttctctgtgtgtagccctggctgtcctggaactcattctgtagaccgggctggcctcgaactcagaaatctgcctgcctctgcctcccaagtgctgggattaaaggaatgtgccttcattgcccggctctagggctttttgttgttgtttgtttgtttgtttgtttgtttgcttttgtggatggcct

SEQ ID NO: 744 - DNA, 1087 bp, synthetic construct
  source 1..1087: mol_type = other DNA
gctcctcctaggagctaacactggagccagggggatcaaagctgtgtagtgagtgtcacaaaacatcctagcactaaggagactgagacgggaacattgtagtaagttctagcctgggctacagtaagagacgtagtctcaaacaaggaaatgcgctataaataaataagatggagcttcaatggtctgtgcataactggggggttgaaggagccttccaaaggctgggttccggctccgttcagtcgttgacttgagctgggcggggcatgcaaataaggacgccgcctggtctccgcggaactctgggaacgaaaagcgcaacaaaatcctctcggcccccttggattcctcgggctttccctggcgtaaaggtggtggacaggatagaagaggagtttcggcgtcgggcgcgtgtttgcggtcgcgcgagtgttggcgaccgtgagttgaaggtgtgtgtggtgttgagtgtatggggcgtgtgggcgcagttcggtaatgatagggacttagggtgatagaagtgcaaagcatgactgtcaaatttttggagcaggttttctgacttcggtcggaaaacccctaaaaccagtaagggagaaaggtcaagtaacatataaaggaaggcctatcagaattacaccagacttttcaccagagactatgaaagccagaagagcctggacagatgttatacagacactaagagaacacaaatgccagcccaggctactatacctggccaaactctcaattaccatagatggagaaaccaaagtattccacgacaaaaacaaattcacacaatatctttccacgaatccagcccttcaaaggataatgacagaaaagaagcaatacaaggacggaaatcacgccctagaacaaccaagaaactaatcattcaacaaaccaaaaagaagacagccacaagaacagaatgccaactctaacaacaaaaataaaaggaagcaacaattacttttccttaatatctcttaatatcaatggactcaattccccaataaaaagacatagactaacagactggctacacaaacaggacccaacattctgctgctta

SEQ ID NO: 745 - DNA, 1087 bp, synthetic construct
  source 1..1087: mol_type = other DNA
gctcctcctaggagctaacactggagccagggggatcaaagctgtgtagtgagtgtcacaaaacatcctagcactaaggagactgagacgggaacattgtagtaagttctagcctgggctacagtaagagacgtagtctcaaacaaggaaatgcgctataaataaataagatggagcttcaatggtctgtgcataactggggggttgaaggagccttccaaaggctgggttccggctccgttcagtcgttgacttgagctgggcggggcatgcaaataaggacgccgcctggtctccgcggaactctgggaacgaaaagcgcaacaaaatcctctcggcccccttggattcctcgggctttccctggcgtaaaggtggtggacaggatagaagaggagtttcggcgtcgggcgcgtgtttgcggtcgcgcgagtgttggcgaccgtgagttgaaggtgtgtgtggtgttgagtgtatggggcgtgtgggcgcagttcggtaatgatagggacttagggtgatagaagtgcaaagcatgactgtcaaatttttggagcaggttttctgacttcggtcggaaaacccctcccaatttcactggtctacaatgaaagcaaaacagttctcttccccgctccccggtgtgtgagaggggctttgatccttctctggtttcctaggaaacgcgtatgtgctagagccacgctctgagacttccgcctcgtgcggtcccgcttcctttctgcctcctctggcctgcatccgtgggggaggtggctggctgcagggttctccggatctcttctgtgttcccactactcaagcaccgagtggcgttctatggcgtccgcctcggctcagcccgcggccctgagcgcggagcaggccaagggtgaggaaagagcctagtctgggtgtgggccgtcttctggggggagggcgcgatactattctttgcctctccaagtggggcccttgcccattagggcgaagggttgggaggacaagcttatcgggttgcttgcaggcctcggcccactaattccctgcctcttccctcctctgggctcgcccgccgtcctccgcg

SEQ ID NO: 746 - DNA, 1087 bp, synthetic construct
  source 1..1087: mol_type = other DNA
gctcctcctaggagctaacactggagccagggggatcaaagctgtgtagtgagtgtcacaaaacatcctagcactaaggagactgagacgggaacattgtagtaagttctagcctgggctacagtaagagacgtagtctcaaacaaggaaatgcgctataaataaataagatggagcttcaatggtctgtgcataactggggggttgaaggagccttccaaaggctgggttccggctccgttcagtcgttgacttgagctgggcggggcatgcaaataaggacgccgcctggtctccgcggaactctgggaacgaaaagcgcaacaaaatcctctcggcccccttggattcctcgggctttccctggcgtaaaggtggtggacaggatagaagaggagtttcggcgtcgggcgcgtgtttgcggtcgcgcgagtgttggcgaccgtgagttgaaggtgtgtgtggtgttgagtgtatggggcgtgtgggcgcagttcggtaatgatagggacttagggtgatagaagtgcaaagcatgactgtcaaatttttggagcaggttttctgacttcggtcggaaaacccctgaatttgttaaattacaggaggaagcttttttagttcattttacaaatactttcttgttaggtagataataccttctaaggttattatctggatcttctaagtctttttatcgctagcaagtctaagtttctggactttggaattagaagttaatgtcgtaggcgggcatggtggtccacgcctttaatcccagagtttgggaggcagacgcaggtggttttctgagttcgaggccatcctgctcttcaatgttagttccaggacagccagggttatacaaagaaaccctgtctcgagaaacaaaacaaacaaaaaaagagtagctgagtgctctgagttgtctctccagccccttagctatttattttcatttaaattatttttgttttattcgcttgtgtgcctgagtttgaatttcccgggattaacagttgaagactagggctggtgagatggctcagcggttaagattgccgactgctcttccaaaggtcctgag

SEQ ID NO: 747 - DNA, 1087 bp, synthetic construct
  source 1..1087: mol_type = other DNA
gctcctcctaggagctaacactggagccagggggatcaaagctgtgtagtgagtgtcacaaaacatcctagcactaaggagactgagacgggaacattgtagtaagttctagcctgggctacagtaagagacgtagtctcaaacaaggaaatgcgctataaataaataagatggagcttcaatggtctgtgcataactggggggttgaaggagccttccaaaggctgggttccggctccgttcagtcgttgacttgagctgggcggggcatgcaaataaggacgccgcctggtctccgcggaactctgggaacgaaaagcgcaacaaaatcctctcggcccccttggattcctcgggctttccctggcgtaaaggtggtggacaggatagaagaggagtttcggcgtcgggcgcgtgtttgcggtcgcgcgagtgttggcgaccgtgagttgaaggtgtgtgtggtgttgagtgtatggggcgtgtgggcgcagttcggtaatgatagggacttagggtgatagaagtgcaaagcatgactgtcaaatttttggagcaggttttctgacttcggtcggaaaacccctaccccctaattctacaagaatagaaagcttagcagctcctctgaatggttgctctcaggtgctagtggttgcaagtcgtatgttgatgcctgcctttgccctacctggtgtgtgagcgtgagcgcgccccacctctccagcctctctcttactgtttttcagacaagatgggactgttgttctcctactgctatgtacctcaatttcaattgatcatgcctggacataactgcccatgttgtaaggtcgtctacgttgtaaggtcgtgctcagtttctgatgcctagactagtcacctttccgtttgcctcctgactgtgtaaatgaggcaaatgaaggtggtctcttaactgacatgttagtgtttgacctatgggatagtttctcattgttgagacagaatttctagaagctggtccgctgagcggctaagagcacttgctgatattgcaaaggatctacctgggtttggttctcagcactcacatggaagttcacat

SEQ ID NO: 748 - DNA, 654 bp, synthetic construct
  source 1..654: mol_type = other DNA
gctcctcctaggagctaacactggagccagggggatcaaagctgtgtagtgagtgtcacaaaacatcctagcactaaggagactgagacgggaacattgtagtaagttctagcctgggctacagtaagagacgtagtctcaaacaaggaaatgcgctataaataaataagatggagcttcaatggtctgtgcataactggggggttgaaggagccttccaaaggctgggttccggctccgttcagtcgttgacttgagctgggcggggcatgcaaataaggacgccgcctggtctccgcggaactctgggaacgaaaagcgcaacaaaatcctctcggcccccttggattcctcgggctttccctggcgtaaaggtggtggacaggatagaagaggagtttcggcgtcgggcgcgtgtttgcggtcgcgcgagtgttggcgaccgtgagttgaaggtgtgtgtggtgttgagtgtatggggcgtgtgggcgcagttcggtaatgatagggacttagggtgatagaagtgcaaagcatgactgtcaaatttttggagcaggttttctgacttcggtcggaaaaccccttgtagttcctgcaatttaattttcgtttaaaactttattttattctttaacttaaaaaaaatatata

SEQ ID NO: 749 - DNA, 533 bp, synthetic construct; identical to SEQ ID NO: 365
  source 1..533: mol_type = other DNA

SEQ ID NO: 750 - DNA, 559 bp, synthetic construct; identical to SEQ ID NO: 366
  source 1..559: mol_type = other DNA

SEQ ID NO: 751 - DNA, 539 bp, synthetic construct; identical to SEQ ID NO: 367
  source 1..539: mol_type = other DNA

SEQ ID NO: 752 - DNA, 533 bp, synthetic construct; identical to SEQ ID NO: 368
  source 1..533: mol_type = other DNA

SEQ ID NO: 753 - DNA, 1088 bp, synthetic construct
  source 1..1088: mol_type = other DNA
acagaatttactaaatagagagtgcagtcatggaattgccattttccccacgtggtttttcgtttgttcctcaccggaggcctccggtttgagcccgaagtctaaaccggtgcgcgtctgcgagctcgcgtgcgcctccgcggccggagcacagtcgcgggcgggcatcagggcggtgcgtggccgtcagtgacgcatgacccttcgcaggcagaagtgggacgggtcaagagaggactgtgatccgattggctgttcggcgaccgtatgctaatcgcggtgacagtctgcgtggtgtagggacacggtagcgactcaaaatgccccgtggacggggtctggagaggtgtcggtctgtcagagaaggtgtccccgcgagggcagacgcggtgtgagatagaggcgcggacagggatgtcacgggtcgtctgtgcgtcagtcgccgtgactaagatgtgggggcggccggtgcagtgcggcgcggtgtggagcgtgaggtttaatgatagggacttagggtgatagaagtgcaaagcatgactgtcaaatttttggagcaggttttctgacttcggtcggaaaacccctactttctggagtttcaaaaacagactgtacgccaagggtcatatctttttttgtattggtttgtgtcttggttggtgtcttaggtgttaatcctacagtggagggtttatgggaataggaagtaacatgtcgcctgcatgtcataggagaaaaagcgagcatcagccgtatcggctttgtaacacaaattagctatcgtgaagtccgctcagctcttccctttctaccctggctgctttttgcagggattggtccgtggtctccagtctcttgggttctcaccctgtgtgaaaatcttcgtgtttttccctaccccccagtcacctcttacacagcctctgcttccaagcgcagcccccacaggagtttgtaggatttctgtgctagcggggaatgtgttctcacctcatagagccaggtagaaattatgcagatgggcagttctctgggaagaaagcagggcctttggggctctcagtgtccccgttgggttgtagaca

SEQ ID NO: 754 - DNA, 1088 bp, synthetic construct
  source 1..1088: mol_type = other DNA
acagaatttactaaatagagagtgcagtcatggaattgccattttccccacgtggtttttcgtttgttcctcaccggaggcctccggtttgagcccgaagtctaaaccggtgcgcgtctgcgagctcgcgtgcgcctccgcggccggagcacagtcgcgggcgggcatcagggcggtgcgtggccgtcagtgacgcatgacccttcgcaggcagaagtgggacgggtcaagagaggactgtgatccgattggctgttcggcgaccgtatgctaatcgcggtgacagtctgcgtggtgtagggacacggtagcgactcaaaatgccccgtggacggggtctggagaggtgtcggtctgtcagagaaggtgtccccgcgagggcagacgcggtgtgagatagaggcgcggacagggatgtcacgggtcgtctgtgcgtcagtcgccgtgactaagatgtgggggcggccggtgcagtgcggcgcggtgtggagcgtgaggtttaatgatagggacttagggtgatagaagtgcaaagcatgactgtcaaatttttggagcaggttttctgacttcggtcggaaaacccctactttctggagtttctaaaagtagactgtacgctaagggtcatatctttttttgttttggtttgtgtcttggttggcgtcttaaatgttaatcctacagtggagggctggcgaataggaagtaacatgtcgcctgcacgccataggagaaaaagcgagcatcagccgtatcggctttgtaacacaaattagctatcgtgaagtccgctcagctcttccctttctaccctggctgctttttgcagggattggtccgtggtctccagtctcttgggttctcaccctgtgtgaaaatcttcctgtttttccctaccccccaagtcacctcttacacagcctctgcttccaagcgcagcccccacaggagtttgtaggatttctgtgctagcggggagtgtgttctcacctcatagagccaggtagaaactacgcagatgggtgctgttctccaggaagaaagcagggcctttggggctctcagtgtccccgttgggttgtaga

SEQ ID NO: 755 - DNA, 1088 bp, synthetic construct
  source 1..1088: mol_type = other DNA
acagaatttactaaatagagagtgcagtcatggaattgccattttccccacgtggtttttcgtttgttcctcaccggaggcctccggtttgagcccgaagtctaaaccggtgcgcgtctgcgagctcgcgtgcgcctccgcggccggagcacagtcgcgggcgggcatcagggcggtgcgtggccgtcagtgacgcatgacccttcgcaggcagaagtgggacgggtcaagagaggactgtgatccgattggctgttcggcgaccgtatgctaatcgcggtgacagtctgcgtggtgtagggacacggtagcgactcaaaatgccccgtggacggggtctggagaggtgtcggtctgtcagagaaggtgtccccgcgagggcagacgcggtgtgagatagaggcgcggacagggatgtcacgggtcgtctgtgcgtcagtcgccgtgactaagatgtgggggcggccggtgcagtgcggcgcggtgtggagcgtgaggtttaatgatagggacttagggtgatagaagtgcaaagcatgactgtcaaatttttggagcaggttttctgacttcggtcggaaaacccctactttctggagtttcaaaaacagaccgtacgccaagggtcatgtcttttttcgtattggtttgtgtcttagttgttaatcctacagtggaggcctggggaataagaagtaacatgtggcctgcacgccataggagaaaaagcgagcatcagccgtatcggctttgtaacacaaattagctatcgtgaagtccgctcagctcttccatttctaccctggctgctttttgcagggattggtccgtggtctccagtctcttgggttctcaccctgtgtgaaaatcttcgtgtttttccctaccccccaagtcacctcttacacagcctctgcttccaagcgcagcccccacaggagtttgtaggatttctgtgctagcggggagtgtgttctcacctcatagagccaggtagaaattatgcagatgggcgctgttctctgggaagaaagcagggcctttggggctctcagtgtccccgttgggttgtagacataacactctta

SEQ ID NO: 756 - DNA, 892 bp, synthetic construct
  source 1..892: mol_type = other DNA
acagaatttactaaatagagagtgcagtcatggaattgccattttccccacgtggtttttcgtttgttcctcaccggaggcctccggtttgagcccgaagtctaaaccggtgcgcgtctgcgagctcgcgtgcgcctccgcggccggagcacagtcgcgggcgggcatcagggcggtgcgtggccgtcagtgacgcatgacccttcgcaggcagaagtgggacgggtcaagagaggactgtgatccgattggctgttcggcgaccgtatgctaatcgcggtgacagtctgcgtggtgtagggacacggtagcgactcaaaatgccccgtggacggggtctggagaggtgtcggtctgtcagagaaggtgtccccgcgagggcagacgcggtgtgagatagaggcgcggacagggatgtcacgggtcgtctgtgcgtcagtcgccgtgactaagatgtgggggcggccggtgcagtgcggcgcggtgtggagcgtgaggtttaatgatagggacttagggtgatagaagtgcaaagcatgactgtcaaatttttggagcaggttttctgacttcggtcggaaaacccctcctccggggatacaacgtgtttcctaaaagtagagggaggtaagagacggtagcacctgcggggcggcttgcacgccgagtgcctgtgacgcgccggcttaacttaactgcttccctgaagtaccttgaggttcctgatgtgcgggcggtagacggtaggcttatgcggcacgctgtcgtttccaccgtggctactgcgctttgggaaggccacgacctcctcctttggggaggtccttaggatctcagcttggcagtcgagtgggtggcgaccttttaaaggaatgggacccacccggagttc

SEQ ID NO: 757 - DNA, 1080 bp, synthetic construct
  source 1..1080: mol_type = other DNA
acagaatttactaaatagagagtgcagtcatggaattgccattttccccacgtggtttttcgtttgttcctcaccggaggcctccggtttgagcccgaagtctaaaccggtgcgcgtctgcgagctcgcgtgcgcctccgcggccggagcacagtcgcgggcgggcatcagggcggtgcgtggccgtcagtgacgcatgacccttcgcaggcagaagtgggacgggtcaagagaggactgtgatccgattggctgttcggcgaccgtatgctaatcgcggtgacagtctgcgtggtgtagggacacggtagcgactcaaaatgccccgtggacggggtctggagaggtgtcggtctgtcagagaaggtgtccccgcgagggcagacgcggtgtgagatagaggcgcggacagggatgtcacgggtcgtctgtgcgtcagtcgccgtgactaagatgtgggggcggccggtgcagtgcggcgcggtgtggagcgtgaggtttaatgatagggacttagggtgatagaagtgcaaagcatgactgtcaaatttttggagcaggttttctgacttcggtcggaaaacccctttcccttcttgtaatacaaaataataacaaccacagaggacatcgcaagtaaaatgtgtataacaaccccatctaaagaaccctatcatctttctactatctgtctacctaaatatgtatagtataaataaccctatatagcactctaagcaacttaagttaggtaacttagaaaactcttttttttttttgagactgagtctcactctgtcgcacccaggctggagtgcagtggcgtgatctcggctcactgcaacctccaccttctgggttcaagtgattctcccatctcagtctcccaagtagctgggattacaggcacgccaccatgccctgctacatttttttttttttagtagagatgaggtttcaccacattggccaggctgttctcgaactcctgacctcaggtgatccgcccaccttggcctcatgaagtgctgggattacaggtgtgagccactgtacccagccagaaaactcttaaaaaac

SEQ ID NO: 758 - DNA, 970 bp, synthetic construct
  source 1..970: mol_type = other DNA
acagaatttactaaatagagagtgcagtcatggaattgccattttccccacgtggtttttcgtttgttcctcaccggaggcctccggtttgagcccgaagtctaaaccggtgcgcgtctgcgagctcgcgtgcgcctccgcggccggagcacagtcgcgggcgggcatcagggcggtgcgtggccgtcagtgacgcatgacccttcgcaggcagaagtgggacgggtcaagagaggactgtgatccgattggctgttcggcgaccgtatgctaatcgcggtgacagtctgcgtggtgtagggacacggtagcgactcaaaatgccccgtggacggggtctggagaggtgtcggtctgtcagagaaggtgtccccgcgagggcagacgcggtgtgagatagaggcgcggacagggatgtcacgggtcgtctgtgcgtcagtcgccgtgactaagatgtgggggcggccggtgcagtgcggcgcggtgtggagcgtgaggtttaatgatagggacttagggtgatagaagtgcaaagcatgactgtcaaatttttggagcaggttttctgacttcggtcggaaaacccctctgaattttcttgcagttgaacaacagaggctttttttgtgtgtgtgggggtgcttggttttgggaggttgaagagtacttgttcgcaaactctctaaatgagagatggggaagtgtcttaccagctgattcgcgagagcacctgcaagtttacctgttttagtgatttgcgtttatgaaagttggagttgctgattttgtgatctctacttttaaggtaaaagcagggcggtgttgacttttcttgccagttggctgtcctgttttctttctcgcactgttttctttttgagacgaagtctgtcgctcaggctggagtgcactggcgtgatctcggctcgctgcaaactttgccgaacccctgtttagcgatttccgtttg

SEQ ID NO: 759 - DNA, 1088 bp, synthetic construct
  source 1..1088: mol_type = other DNA
acagaatttactaaatagagagtgcagtcatggaattgccattttccccacgtggtttttcgtttgttcctcaccggaggcctccggtttgagcccgaagtctaaaccggtgcgcgtctgcgagctcgcgtgcgcctccgcggccggagcacagtcgcgggcgggcatcagggcggtgcgtggccgtcagtgacgcatgacccttcgcaggcagaagtgggacgggtcaagagaggactgtgatccgattggctgttcggcgaccgtatgctaatcgcggtgacagtctgcgtggtgtagggacacggtagcgactcaaaatgccccgtggacggggtctggagaggtgtcggtctgtcagagaaggtgtccccgcgagggcagacgcggtgtgagatagaggcgcggacagggatgtcacgggtcgtctgtgcgtcagtcgccgtgactaagatgtgggggcggccggtgcagtgcggcgcggtgtggagcgtgaggtttaatgatagggacttagggtgatagaagtgcaaagcatgactgtcaaatttttggagcaggttttctgacttcggtcggaaaacccctatatgtggtaatccaacaatagaaattatttttaagtttgtgtgttcctttttctgttcaatggtgcttttgatattgttgtaaagcagtgactagcagattctgtgtggtaaaagcactgaaccctgtttagttcttttctccctaccttattggtaattatttctgtgtatatatgttccaaagaaatgcggcttgtatattcatgcttttcaactttttgtgatagacagttgatacacaagtagtacctcctccgggatcttcttagtcaagactgtttggtagatgcatgttttttgttacttgtaatgtacagtattcagttcattttctttttgcagcactgtccggttgaaacacaacgcgaggatcgggcgtggtggctcacgcctgtaatcccagcactttgggaggccgaggcaggacaatcaagaccaatcctggtcatcaaggcaggagaatcaagaccatcgaggtcaggagatcaagaccatcct

SEQ ID NO: 760 - DNA, 1086 bp, synthetic construct
  source 1..1086: mol_type = other DNA
acagaatttactaaatagagagtgcagtcatggaattgccattttccccacgtggtttttcgtttgttcctcaccggaggcctccggtttgagcccgaagtctaaaccggtgcgcgtctgcgagctcgcgtgcgcctccgcggccggagcacagtcgcgggcgggcatcagggcggtgcgtggccgtcagtgacgcatgacccttcgcaggcagaagtgggacgggtcaagagaggactgtgatccgattggctgttcggcgaccgtatgctaatcgcggtgacagtctgcgtggtgtagggacacggtagcgactcaaaatgccccgtggacggggtctggagaggtgtcggtctgtcagagaaggtgtccccgcgagggcagacgcggtgtgagatagaggcgcggacagggatgtcacgggtcgtctgtgcgtcagtcgccgtgactaagatgtgggggcggccggtgcagtgcggcgcggtgtggagcgtgaggtttaatgatagggacttagggtgatagaagtgcaaagcatgactgtcaaatttttggagcaggttttctgacttcggtcggaaaacccctacatcaggttgtttttctgtttttacatcaggttgtttttctgtttggttttttttttacaccacgtttatacgccggtgcacggtttaccactgaaaacacctttcatctacaggtgatatcttttaacacaaataaaatgtagtagtcctaggagacggaatagaaggaggtggggcctaggcagattcatctctgcggtgcattttgcctctggccctcgggccctagtttgcgatctttcccatcttgcctctgcttccctctgcacaatcctgagtattgcagtaccttacacttaaggaaatttcgtcttgccaaagttgatccatttcagctccgaaacataacaggaactagtgcaacgataaacgtatgaggaacttgcaataagagtgacagaatcctttgaatcaaaaaaaaaaaaagccaccacttaatgagtatctaccatatgtcaagggcttcaccaatatttcattgaaatattccagacca

SEQ ID NO: 761 - DNA, 1088 bp, synthetic construct
  source 1..1088: mol_type = other DNA
acagaatttactaaatagagagtgcagtcatggaattgccattttccccacgtggtttttcgtttgttcctcaccggaggcctccggtttgagcccgaagtctaaaccggtgcgcgtctgcgagctcgcgtgcgcctccgcggccggagcacagtcgcgggcgggcatcagggcggtgcgtggccgtcagtgacgcatgacccttcgcaggcagaagtgggacgggtcaagagaggactgtgatccgattggctgttcggcgaccgtatgctaatcgcggtgacagtctgcgtggtgtagggacacggtagcgactcaaaatgccccgtggacggggtctggagaggtgtcggtctgtcagagaaggtgtccccgcgagggcagacgcggtgtgagatagaggcgcggacagggatgtcacgggtcgtctgtgcgtcagtcgccgtgactaagatgtgggggcggccggtgcagtgcggcgcggtgtggagcgtgaggtttaatgatagggacttagggtgatagaagtgcaaagcatgactgtcaaatttttggagcaggttttctgacttcggtcggaaaacccctcttatgatgtttgttgccaatgatagattgttttcactgtgcaaaaattatgggtagttttggtggtcttgatgcagttgtaagcttggggtatgaaggtttgggccacgcctgggcgcttccggctgcgccggatgctgtttcctttccgctcccaggggcgttgggaacggttgtaggacgtggctctttattcgtgagttttccatttacctccgctgaacctagagcttcagacgccctatggcgtccgcctcgacccaaccggcggccttgagcgctgagcaagcaaagggtgagaatcgtcctagtcaaggcataggctgctggcctggggtagtcaaggcatgggctgctggtctggggaggatgcgggcggaggatgtggggcgacaaacctggctacgtccgccgggaaaatggggtaggggacgccgggtaccgtccttctaagtggggcgcttgcccccaagacttgggatcttattgggttacctaca

SEQ ID NO: 762 - DNA, 1086 bp, synthetic construct
  source 1..1086: mol_type = other DNA
acagaatttactaaatagagagtgcagtcatggaattgccattttccccacgtggtttttcgtttgttcctcaccggaggcctccggtttgagcccgaagtctaaaccggtgcgcgtctgcgagctcgcgtgcgcctccgcggccggagcacagtcgcgggcgggcatcagggcggtgcgtggccgtcagtgacgcatgacccttcgcaggcagaagtgggacgggtcaagagaggactgtgatccgattggctgttcggcgaccgtatgctaatcgcggtgacagtctgcgtggtgtagggacacggtagcgactcaaaatgccccgtggacggggtctggagaggtgtcggtctgtcagagaaggtgtccccgcgagggcagacgcggtgtgagatagaggcgcggacagggatgtcacgggtcgtctgtgcgtcagtcgccgtgactaagatgtgggggcggccggtgcagtgcggcgcggtgtggagcgtgaggtttaatgatagggacttagggtgatagaagtgcaaagcatgactgtcaaatttttggagcaggttttctgacttcggtcggaaaaccccttctttactgttatatgttaggcgaaatattacgcgtttggagtaagtggtgctttttgtaactgaaaagagattctgtgtgtgtttttttttttttagaggctgcatagttatttgtatgaaccgcaggtgacctaattagcaaggtaattcagacctgtatcctagcacttaagaagtggaagtgggataaccctgcgtgttctcgtgtgggaggctagcttaagcaacaaagcaggaaggccccaccaacaaaagaatttaaaaattatacgtgcgtggtggcgcgcgtatgaggaaattatttggcaactgtgttacagtatagcagcaaatggaatagacctagtccctgactttaggagacctgcctcagccccccgaatggctgggactacaggcgtgcgcctccgcgcccagctaatttttgcatttttggtagagacgggttcaccatgttggccaggatggtctccatctcttcatctggtgatccgcc

SEQ ID NO: 763 - DNA, 1088 bp, synthetic construct
  source 1..1088: mol_type = other DNA
acagaatttactaaatagagagtgcagtcatggaattgccattttccccacgtggtttttcgtttgttcctcaccggaggcctccggtttgagcccgaagtctaaaccggtgcgcgtctgcgagctcgcgtgcgcctccgcggccggagcacagtcgcgggcgggcatcagggcggtgcgtggccgtcagtgacgcatgacccttcgcaggcagaagtgggacgggtcaagagaggactgtgatccgattggctgttcggcgaccgtatgctaatcgcggtgacagtctgcgtggtgtagggacacggtagcgactcaaaatgccccgtggacggggtctggagaggtgtcggtctgtcagagaaggtgtccccgcgagggcagacgcggtgtgagatagaggcgcggacagggatgtcacgggtcgtctgtgcgtcagtcgccgtgactaagatgtgggggcggccggtgcagtgcggcgcggtgtggagcgtgaggtttaatgatagggacttagggtgatagaagtgcaaagcatgactgtcaaatttttggagcaggttttctgacttcggtcggaaaacccctaccttattcacgcctaaaaagtagactgactgtggggtggtcgtgttttttgtttcttgttggtaggtggtgaatgcgtttttttcgttgttttctccgttactcaggctgccagttgcttggcagtcttgtcgctggctgtggacgctctgcacttcatcaccgtccccagctgcgctttgagccggtctaaggttgcccacagtattgacgttgggacccacgaaactggcaatttccatgtgtgcggccttacccagttctcccaaacttctgcgtataaccgcttctctgtgcttcagaaagataagtccggccccggcctcacacagcagctcagttcgtgacagcgtttaatatgtaaaatggagcaaataatttatagggcgttgggagagttaaagagactaattcatttacgtgttaaatacagggaatggcttttgcattgatataaccccagcctccagcatgcgccagacctgacgtaggtgttcggc

SEQ ID NO: 764 - DNA, 1088 bp, synthetic construct
  source 1..1088: mol_type = other DNA
acagaatttactaaatagagagtgcagtcatggaattgccattttccccacgtggtttttcgtttgttcctcaccggaggcctccggtttgagcccgaagtctaaaccggtgcgcgtctgcgagctcgcgtgcgcctccgcggccggagcacagtcgcgggcgggcatcagggcggtgcgtggccgtcagtgacgcatgacccttcgcaggcagaagtgggacgggtcaagagaggactgtgatccgattggctgttcggcgaccgtatgctaatcgcggtgacagtctgcgtggtgtagggacacggtagcgactcaaaatgccccgtggacggggtctggagaggtgtcggtctgtcagagaaggtgtccccgcgagggcagacgcggtgtgagatagaggcgcggacagggatgtcacgggtcgtctgtgcgtcagtcgccgtgactaagatgtgggggcggccggtgcagtgcggcgcggtgtggagcgtgaggtttaatgatagggacttagggtgatagaagtgcaaagcatgactgtcaaatttttggagcaggttttctgacttcggtcggaaaaccccttttgacccattacccatctaagttagatgcttttttaaatgttttttaatttttaaatttttaatttttttcattatttattttttatttttgagacggatctcggctcactgtaacctccacctcccgggttcaagcgattctcctgactcagcctcccgagtagctgggattacaggcgcgcgccaccatgcccggctaatttttctatttttagtaaagacggggtttcgccatgttgaccagggtggtcttgaactcctgacgtcaggtgatcctcctgcctcgtgctgggattgcaggcgtgagccaccgctcccggcccttagatgctttttaatcagcaagtacgcaatgctttcctgacaggaatgtcaagtccgtcaggaaatccacataagggtgttaagcaggcaaagtaccacatacagattaaaatcaaaagcactgtcaacgcttatttaatttatacagtagaccctaacttttctaattttgtg

SEQ ID NO: 765 - DNA, 1088 bp, synthetic construct
  source 1..1088: mol_type = other DNA
acagaatttactaaatagagagtgcagtcatggaattgccattttccccacgtggtttttcgtttgttcctcaccggaggcctccggtttgagcccgaagtctaaaccggtgcgcgtctgcgagctcgcgtgcgcctccgcggccggagcacagtcgcgggcgggcatcagggcggtgcgtggccgtcagtgacgcatgacccttcgcaggcagaagtgggacgggtcaagagaggactgtgatccgattggctgttcggcgaccgtatgctaatcgcggtgacagtctgcgtggtgtagggacacggtagcgactcaaaatgccccgtggacggggtctggagaggtgtcggtctgtcagagaaggtgtccccgcgagggcagacgcggtgtgagatagaggcgcggacagggatgtcacgggtcgtctgtgcgtcagtcgccgtgactaagatgtgggggcggccggtgcagtgcggcgcggtgtggagcgtgaggtttaatgatagggacttagggtgatagaagtgcaaagcatgactgtcaaatttttggagcaggttttctgacttcggtcggaaaacccctgtttacttggttttaaaaatagcttgcactagcgataccgcgaatatggttattaggtttgttaggcacagtcgtgtcttactatagaaaaataacgtagtgttcattttgctgcctgtatgtgttaatttgtccttattgcgccattgttcttgttaagtcttctgtaaggagttgcgggtttcaaactgtcagtctgagagcataagctcacttttcagtcagttgaattgaatgttacattcgattggttctggatattgatattacccaaggcttgtcctgtttgtaagtcttttcctacacctgacaatatgattatgtttacaatgtccctagaactctgggtgtatcgttcccactgaataaaatttgatctctaagttgacctataaatttaagtaccaaaaaactggtttgtaagattttggaaggcagaggcagggaagagaccaacgtggtctacatataaagtaccaggtacatataaagtaccaggt

SEQ ID NO: 766 - DNA, 1084 bp, synthetic construct
  source 1..1084: mol_type = other DNA
acagaatttactaaatagagagtgcagtcatggaattgccattttccccacgtggtttttcgtttgttcctcaccggaggcctccggtttgagcccgaagtctaaaccggtgcgcgtctgcgagctcgcgtgcgcctccgcggccggagcacagtcgcgggcgggcatcagggcggtgcgtggccgtcagtgacgcatgacccttcgcaggcagaagtgggacgggtcaagagaggactgtgatccgattggctgttcggcgaccgtatgctaatcgcggtgacagtctgcgtggtgtagggacacggtagcgactcaaaatgccccgtggacggggtctggagaggtgtcggtctgtcagagaaggtgtccccgcgagggcagacgcggtgtgagatagaggcgcggacagggatgtcacgggtcgtctgtgcgtcagtcgccgtgactaagatgtgggggcggccggtgcagtgcggcgcggtgtggagcgtgaggtttaatgatagggacttagggtgatagaagtgcaaagcatgactgtcaaatttttggagcaggttttctgacttcggtcggaaaacccctatttttgtggtgctaaaagttagattgcattccgcccttctcacgtctctttacgtgttgtttgcgaggcgtggcctcggaggtaaatggtctccttttacctcagataagcttacctttgctctgtgagtaagaatgtagctacacttccaaatttagctattgtcctttgcggtccaaatgaaaatattaccttccgatctaacaatgttaaactagtcccaggcccttctatcgattgccagaatagactagactactacacagacacaccctctcaaatcaggccagctcctgcaacctgcacctacagtttgtcccctgggacaaatgaaaggacaggccctctttcccccccccccccaaatcagagcacacacagatcttggggtctggggcagaaatttcgttcatggaaaaaacaaacaaacaaacaaacacgatcaaaggaagctcgttccctttggcctcagggtttcttagacgccgtgttccc

SEQ ID NO: 767 - DNA, 1085 bp, synthetic construct
  source 1..1085: mol_type = other DNA
acagaatttactaaatagagagtgcagtcatggaattgccattttccccacgtggtttttcgtttgttcctcaccggaggcctccggtttgagcccgaagtctaaaccggtgcgcgtctgcgagctcgcgtgcgcctccgcggccggagcacagtcgcgggcgggcatcagggcggtgcgtggccgtcagtgacgcatgacccttcgcaggcagaagtgggacgggtcaagagaggactgtgatccgattggctgttcggcgaccgtatgctaatcgcggtgacagtctgcgtggtgtagggacacggtagcgactcaaaatgccccgtggacggggtctggagaggtgtcggtctgtcagagaaggtgtccccgcgagggcagacgcggtgtgagatagaggcgcggacagggatgtcacgggtcgtctgtgcgtcagtcgccgtgactaagatgtgggggcggccggtgcagtgcggcgcggtgtggagcgtgaggtttaatgatagggacttagggtgatagaagtgcaaagcatgactgtcaaatttttggagcaggttttctgacttcggtcggaaaacccctataactggtaaccaaaagcagattactttcccccttgtggtcttcgcgtttgcggacgggagagaactttcggccattttccttttagaaatttaacttcttgaaggccaccaggtgacccttacttccctctcacctttccttctacctgtactttctctattaaaaagcctgcagaagtacccttgacaaattgccaaaaatgacacctaaaaaaaaaaaaaggaaaaacgacaccttaggtaattataggttgtaagaaaaagatttgacctcttggagtttttatttcttaataccaaaggacacccaaggaacgtatctctcaaaattgggtttcaaacctcagccgtttccttcttagttccagtgcttaacacgcaacagacctgcacaccactacactgcatacgagttttaaagttaataaatcagtcacccctccatagtcttctacctacttgaagacagaaacggctgctaggaagcaattcttc

SEQ ID NO: 768 - DNA, 1088 bp, synthetic construct
  source 1..1088: mol_type = other DNA
acagaatttactaaatagagagtgcagtcatggaattgccattttccccacgtggtttttcgtttgttcctcaccggaggcctccggtttgagcccgaagtctaaaccggtgcgcgtctgcgagctcgcgtgcgcctccgcggccggagcacagtcgcgggcgggcatcagggcggtgcgtggccgtcagtgacgcatgacccttcgcaggcagaagtgggacgggtcaagagaggactgtgatccgattggctgttcggcgaccgtatgctaatcgcggtgacagtctgcgtggtgtagggacacggtagcgactcaaaatgccccgtggacggggtctggagaggtgtcggtctgtcagagaaggtgtccccgcgagggcagacgcggtgtgagatagaggcgcggacagggatgtcacgggtcgtctgtgcgtcagtcgccgtgactaagatgtgggggcggccggtgcagtgcggcgcggtgtggagcgtgaggtttaatgatagggacttagggtgatagaagtgcaaagcatgactgtcaaatttttggagcaggttttctgacttcggtcggaaaacccctctggggaataagagtggtttaaagaaagaacaatttgagagatctgcttagatctaataaaacccaagtatagtttctttagacgtcttatatctcacgtaggacctcttatttcagactcactgcaagaacaagctaaagaactatatacagtcaggaacaaggtgagccatcgcggttctcagtcccatgatcttaagagtttttcctcttcccctcttccctggctgtcctggagctcactctgtagaccaggctggtctcaaactcagaaatccacttacctctgcctcccaagggctgggattaaaggcatgcaccaccattgcccggcagggtatgtggactatgctgtccttcaactcagagatcgtggtactttaaatctcattttccgaaagaaaagaaaagaaaggaaggggggaaataaagccagtatattttgcacccacaatctgaagttctacaaatattgttagaaaatgcaaaggacccaagtc

SEQ ID NO: 769 - DNA, 1088 bp, synthetic construct
  source 1..1088: mol_type = other DNA
acagaatttactaaatagagagtgcagtcatggaattgccattttccccacgtggtttttcgtttgttcctcaccggaggcctccggtttgagcccgaagtctaaaccggtgcgcgtctgcgagctcgcgtgcgcctccgcggccggagcacagtcgcgggcgggcatcagggcggtgcgtggccgtcagtgacgcatgacccttcgcaggcagaagtgggacgggtcaagagaggactgtgatccgattggctgttcggcgaccgtatgctaatcgcggtgacagtctgcgtggtgtagggacacggtagcgactcaaaatgccccgtggacggggtctggagaggtgtcggtctgtcagagaaggtgtccccgcgagggcagacgcggtgtgagatagaggcgcggacagggatgtcacgggtcgtctgtgcgtcagtcgccgtgactaagatgtgggggcggccggtgcagtgcggcgcggtgtggagcgtgaggtttaatgatagggacttagggtgatagaagtgcaaagcatgactgtcaaatttttggagcaggttttctgacttcggtcggaaaacccctctcggtttatcttaaagggttttaaatatagaaagcttccttagtcttatgggtgagagtgctgtttaagccttacctaggtatgtctttgaacatttattacagattgttatttgtgactatgaccactcaggtgttctgttcttgtgaatttagacacactcagaaaggctacacactcaaagaccacaccaaagtgaagtactatctgggccgtgaaactggtcacatatcagttattttgcagtaaaacaaggaagtcaatcatactgcttcagtgggtcagggagtcaagaatgcacagtacaagagctggtgagattcctcagcaggtaagagcactgaatgctcttccaaagattctgagttcaaatcccagcaaccacgtggtggatttgaacaaaggatgaaaacaaccatccataaccagatctgatgccctcttctggagtgtcaaaagacagctatggtgtacttacataaataaataagtaaaaaca

SEQ ID NO: 770 - DNA, 1088 bp, synthetic construct
  source 1..1088: mol_type = other DNA
acagaatttactaaatagagagtgcagtcatggaattgccattttccccacgtggtttttcgtttgttcctcaccggaggcctccggtttgagcccgaagtctaaaccggtgcgcgtctgcgagctcgcgtgcgcctccgcggccggagcacagtcgcgggcgggcatcagggcggtgcgtggccgtcagtgacgcatgacccttcgcaggcagaagtgggacgggtcaagagaggactgtgatccgattggctgttcggcgaccgtatgctaatcgcggtgacagtctgcgtggtgtagggacacggtagcgactcaaaatgccccgtggacggggtctggagaggtgtcggtctgtcagagaaggtgtccccgcgagggcagacgcggtgtgagatagaggcgcggacagggatgtcacgggtcgtctgtgcgtcagtcgccgtgactaagatgtgggggcggccggtgcagtgcggcgcggtgtggagcgtgaggtttaatgatagggacttagggtgatagaagtgcaaagcatgactgtcaaatttttggagcaggttttctgacttcggtcggaaaacccctccacattttgtgtttaaaaatagaaatatttaagtgagatcagtttaaatctgctttatctagggtgtctaactgcttgcatctttttaacttttccttatttgtgagaaggtctgtaaaacttattatatgttagtacactgtagctgtcttcagacactccagaagagggattcagatcaccttacagatggttttgagccaccatgtggttgctgggatttgaactcaggacctttagaaaagtagttgggtgctcttacccgctgagccatctcaccagccctttttttttcttttttccagttcgggtttctctgtgtgtagccctggctgtcctggaactcattctgtagaccgggctggcctcgaactcagaaatctgcctgcctctgcctcccaagtgctgggattaaaggaatgtgccttcattgcccggctctagggctttttgttgttgtttgtttgtttgtttgtttgtttgcttttgtggatggcct

SEQ ID NO: 771 - DNA, 1088 bp, synthetic construct
  source 1..1088: mol_type = other DNA
acagaatttactaaatagagagtgcagtcatggaattgccattttccccacgtggtttttcgtttgttcctcaccggaggcctccggtttgagcccgaagtctaaaccggtgcgcgtctgcgagctcgcgtgcgcctccgcggccggagcacagtcgcgggcgggcatcagggcggtgcgtggccgtcagtgacgcatgacccttcgcaggcagaagtgggacgggtcaagagaggactgtgatccgattggctgttcggcgaccgtatgctaatcgcggtgacagtctgcgtggtgtagggacacggtagcgactcaaaatgccccgtggacggggtctggagaggtgtcggtctgtcagagaaggtgtccccgcgagggcagacgcggtgtgagatagaggcgcggacagggatgtcacgggtcgtctgtgcgtcagtcgccgtgactaagatgtgggggcggccggtgcagtgcggcgcggtgtggagcgtgaggtttaatgatagggacttagggtgatagaagtgcaaagcatgactgtcaaatttttggagcaggttttctgacttcggtcggaaaacccctaaaaccagtaagggagaaaggtcaagtaacatataaaggaaggcctatcagaattacaccagacttttcaccagagactatgaaagccagaagagcctggacagatgttatacagacactaagagaacacaaatgccagcccaggctactatacctggccaaactctcaattaccatagatggagaaaccaaagtattccacgacaaaaacaaattcacacaatatctttccacgaatccagcccttcaaaggataatgacagaaaagaagcaatacaaggacggaaatcacgccctagaacaaccaagaaactaatcattcaacaaaccaaaaagaagacagccacaagaacagaatgccaactctaacaacaaaaataaaaggaagcaacaattacttttccttaatatctcttaatatcaatggactcaattccccaataaaaagacatagactaacagactggctacacaaacaggacccaacattctgctgctta

SEQ ID NO: 772 - DNA, 1088 bp, synthetic construct
  source 1..1088: mol_type = other DNA
acagaatttactaaatagagagtgcagtcatggaattgccattttccccacgtggtttttcgtttgttcctcaccggaggcctccggtttgagcccgaagtctaaaccggtgcgcgtctgcgagctcgcgtgcgcctccgcggccggagcacagtcgcgggcgggcatcagggcggtgcgtggccgtcagtgacgcatgacccttcgcaggcagaagtgggacgggtcaagagaggactgtgatccgattggctgttcggcgaccgtatgctaatcgcggtgacagtctgcgtggtgtagggacacggtagcgactcaaaatgccccgtggacggggtctggagaggtgtcggtctgtcagagaaggtgtccccgcgagggcagacgcggtgtgagatagaggcgcggacagggatgtcacgggtcgtctgtgcgtcagtcgccgtgactaagatgtgggggcggccggtgcagtgcggcgcggtgtggagcgtgaggtttaatgatagggacttagggtgatagaagtgcaaagcatgactgtcaaatttttggagcaggttttctgacttcggtcggaaaacccctcccaatttcactggtctacaatgaaagcaaaacagttctcttccccgctccccggtgtgtgagaggggctttgatccttctctggtttcctaggaaacgcgtatgtgctagagccacgctctgagacttccgcctcgtgcggtcccgcttcctttctgcctcctctggcctgcatccgtgggggaggtggctggctgcagggttctccggatctcttctgtgttcccactactcaagcaccgagtggcgttctatggcgtccgcctcggctcagcccgcggccctgagcgcggagcaggccaagggtgaggaaagagcctagtctgggtgtgggccgtcttctggggggagggcgcgatactattctttgcctctccaagtggggcccttgcccattagggcgaagggttgggaggacaagcttatcgggttgcttgcaggcctcggcccactaattccctgcctcttccctcctctgggctcgcccgccgtcctccgcg

SEQ ID NO: 773 - DNA, 1088 bp, synthetic construct
  source 1..1088: mol_type = other DNA
acagaatttactaaatagagagtgcagtcatggaattgccattttccccacgtggtttttcgtttgttcctcaccggaggcctccggtttgagcccgaagtctaaaccggtgcgcgtctgcgagctcgcgtgcgcctccgcggccggagcacagtcgcgggcgggcatcagggcggtgcgtggccgtcagtgacgcatgacccttcgcaggcagaagtgggacgggtcaagagaggactgtgatccgattggctgttcggcgaccgtatgctaatcgcggtgacagtctgcgtggtgtagggacacggtagcgactcaaaatgccccgtggacggggtctggagaggtgtcggtctgtcagagaaggtgtccccgcgagggcagacgcggtgtgagatagaggcgcggacagggatgtcacgggtcgtctgtgcgtcagtcgccgtgactaagatgtgggggcggccggtgcagtgcggcgcggtgtggagcgtgaggtttaatgatagggacttagggtgatagaagtgcaaagcatgactgtcaaatttttggagcaggttttctgacttcggtcggaaaacccctgaatttgttaaattacaggaggaagcttttttagttcattttacaaatactttcttgttaggtagataataccttctaaggttattatctggatcttctaagtctttttatcgctagcaagtctaagtttctggactttggaattagaagttaatgtcgtaggcgggcatggtggtccacgcctttaatcccagagtttgggaggcagacgcaggtggttttctgagttcgaggccatcctgctcttcaatgttagttccaggacagccagggttatacaaagaaaccctgtctcgagaaacaaaacaaacaaaaaaagagtagctgagtgctctgagttgtctctccagccccttagctatttattttcatttaaattatttttgttttattcgcttgtgtgcctgagtttgaatttcccgggattaacagttgaagactagggctggtgagatggctcagcggttaagattgccgactgctcttccaaaggtcctgag

SEQ ID NO: 774 - DNA, 1088 bp, synthetic construct
  source 1..1088: mol_type = other DNA
acagaatttactaaatagagagtgcagtcatggaattgccattttccccacgtggtttttcgtttgttcctcaccggaggcctccggtttgagcccgaagtctaaaccggtgcgcgtctgcgagctcgcgtgcgcctccgcggccggagcacagtcgcgggcgggcatcagggcggtgcgtggccgtcagtgacgcatgacccttcgcaggcagaagtgggacgggtcaagagaggactgtgatccgattggctgttcggcgaccgtatgctaatcgcggtgacagtctgcgtggtgtagggacacggtagcgactcaaaatgccccgtggacggggtctggagaggtgtcggtctgtcagagaaggtgtccccgcgagggcagacgcggtgtgagatagaggcgcggacagggatgtcacgggtcgtctgtgcgtcagtcgccgtgactaagatgtgggggcggccggtgcagtgcggcgcggtgtggagcgtgaggtttaatgatagggacttagggtgatagaagtgcaaagcatgactgtcaaatttttggagcaggttttctgacttcggtcggaaaacccctaccccctaattctacaagaatagaaagcttagcagctcctctgaatggttgctctcaggtgctagtggttgcaagtcgtatgttgatgcctgcctttgccctacctggtgtgtgagcgtgagcgcgccccacctctccagcctctctcttactgtttttcagacaagatgggactgttgttctcctactgctatgtacctcaatttcaattgatcatgcctggacataactgcccatgttgtaaggtcgtctacgttgtaaggtcgtgctcagtttctgatgcctagactagtcacctttccgtttgcctcctgactgtgtaaatgaggcaaatgaaggtggtctcttaactgacatgttagtgtttgacctatgggatagtttctcattgttgagacagaatttctagaagctggtccgctgagcggctaagagcacttgctgatattgcaaaggatctacctgggtttggttctcagcactcacatggaagttcacat

SEQ ID NO: 775 - DNA, 655 bp, synthetic construct
  source 1..655: mol_type = other DNA
acagaatttactaaatagagagtgcagtcatggaattgccattttccccacgtggtttttcgtttgttcctcaccggaggcctccggtttgagcccgaagtctaaaccggtgcgcgtctgcgagctcgcgtgcgcctccgcggccggagcacagtcgcgggcgggcatcagggcggtgcgtggccgtcagtgacgcatgacccttcgcaggcagaagtgggacgggtcaagagaggactgtgatccgattggctgttcggcgaccgtatgctaatcgcggtgacagtctgcgtggtgtagggacacggtagcgactcaaaatgccccgtggacggggtctggagaggtgtcggtctgtcagagaaggtgtccccgcgagggcagacgcggtgtgagatagaggcgcggacagggatgtcacgggtcgtctgtgcgtcagtcgccgtgactaagatgtgggggcggccggtgcagtgcggcgcggtgtggagcgtgaggtttaatgatagggacttagggtgatagaagtgcaaagcatgactgtcaaatttttggagcaggttttctgacttcggtcggaaaaccccttgtagttcctgcaatttaattttcgtttaaaactttattttattctttaacttaaaaaaaatatata

SEQ ID NO: 776 - DNA, 1087 bp, synthetic construct
  source 1..1087: mol_type = other DNA
ttatctacgttggttttactacagaaactactgttctcagtaaaagcagagagagtacaatgccaacagctttgaaatcctctgtgctcttgtgccaatcccaccctcagaacagggagtctgtcggttatgttttcgtcctttacagttcttcgccgtctaatccattggaaacctcctttatttaaaggaaaccgtgtccaaattcagtgtacagaggtgcaaacctccgccccgctccttgtaggaagcccacgggaactgggccaatcggacggcgcttactcggctcatttacatacccataacacaccgcggctaatgcaaatattttcgtgaaaagatcttccattactcgaagttttaaaactaaaaacaaaatattatttcaaaagatcatgaagaaatttctgtcggtaacagcagtttcaattgataaatcaccatcacttatctaggaggttctgttactctagaagtgaattaagcaggacagctgtaatgatagggacttagggtgatagaagtgcaaagcatgactgtcaaatttttggagcaggttttctgacttcggtcggaaaacccctactttctggagtttcaaaaacagactgtacgccaagggtcatatctttttttgtattggtttgtgtcttggttggtgtcttaggtgttaatcctacagtggagggtttatgggaataggaagtaacatgtcgcctgcatgtcataggagaaaaagcgagcatcagccgtatcggctttgtaacacaaattagctatcgtgaagtccgctcagctcttccctttctaccctggctgctttttgcagggattggtccgtggtctccagtctcttgggttctcaccctgtgtgaaaatcttcgtgtttttccctaccccccagtcacctcttacacagcctctgcttccaagcgcagcccccacaggagtttgtaggatttctgtgctagcggggaatgtgttctcacctcatagagccaggtagaaattatgcagatgggcagttctctgggaagaaagcagggcctttggggctctcagtgtccccgttgggttgtagaca

SEQ ID NO: 777 - DNA, 1087 bp, synthetic construct
  source 1..1087: mol_type = other DNA
ttatctacgttggttttactacagaaactactgttctcagtaaaagcagagagagtacaatgccaacagctttgaaatcctctgtgctcttgtgccaatcccaccctcagaacagggagtctgtcggttatgttttcgtcctttacagttcttcgccgtctaatccattggaaacctcctttatttaaaggaaaccgtgtccaaattcagtgtacagaggtgcaaacctccgccccgctccttgtaggaagcccacgggaactgggccaatcggacggcgcttactcggctcatttacatacccataacacaccgcggctaatgcaaatattttcgtgaaaagatcttccattactcgaagttttaaaactaaaaacaaaatattatttcaaaagatcatgaagaaatttctgtcggtaacagcagtttcaattgataaatcaccatcacttatctaggaggttctgttactctagaagtgaattaagcaggacagctgtaatgatagggacttagggtgatagaagtgcaaagcatgactgtcaaatttttggagcaggttttctgacttcggtcggaaaacccctactttctggagtttctaaaagtagactgtacgctaagggtcatatctttttttgttttggtttgtgtcttggttggcgtcttaaatgttaatcctacagtggagggctggcgaataggaagtaacatgtcgcctgcacgccataggagaaaaagcgagcatcagccgtatcggctttgtaacacaaattagctatcgtgaagtccgctcagctcttccctttctaccctggctgctttttgcagggattggtccgtggtctccagtctcttgggttctcaccctgtgtgaaaatcttcctgtttttccctaccccccaagtcacctcttacacagcctctgcttccaagcgcagcccccacaggagtttgtaggatttctgtgctagcggggagtgtgttctcacctcatagagccaggtagaaactacgcagatgggtgctgttctccaggaagaaagcagggcctttggggctctcagtgtccccgttgggttgtaga

SEQ ID NO: 778 - DNA, 1087 bp, synthetic construct
  source 1..1087: mol_type = other DNA
ttatctacgttggttttactacagaaactactgttctcagtaaaagcagagagagtacaatgccaacagctttgaaatcctctgtgctcttgtgccaatcccaccctcagaacagggagtctgtcggttatgttttcgtcctttacagttcttcgccgtctaatccattggaaacctcctttatttaaaggaaaccgtgtccaaattcagtgtacagaggtgcaaacctccgccccgctccttgtaggaagcccacgggaactgggccaatcggacggcgcttactcggctcatttacatacccataacacaccgcggctaatgcaaatattttcgtgaaaagatcttccattactcgaagttttaaaactaaaaacaaaatattatttcaaaagatcatgaagaaatttctgtcggtaacagcagtttcaattgataaatcaccatcacttatctaggaggttctgttactctagaagtgaattaagcaggacagctgtaatgatagggacttagggtgatagaagtgcaaagcatgactgtcaaatttttggagcaggttttctgacttcggtcggaaaacccctactttctggagtttcaaaaacagaccgtacgccaagggtcatgtcttttttcgtattggtttgtgtcttagttgttaatcctacagtggaggcctggggaataagaagtaacatgtggcctgcacgccataggagaaaaagcgagcatcagccgtatcggctttgtaacacaaattagctatcgtgaagtccgctcagctcttccatttctaccctggctgctttttgcagggattggtccgtggtctccagtctcttgggttctcaccctgtgtgaaaatcttcgtgtttttccctaccccccaagtcacctcttacacagcctctgcttccaagcgcagcccccacaggagtttgtaggatttctgtgctagcggggagtgtgttctcacctcatagagccaggtagaaattatgcagatgggcgctgttctctgggaagaaagcagggcctttggggctctcagtgtccccgttgggttgtagacataacactctta

SEQ ID NO: 779 - DNA, 891 bp, synthetic construct
  source 1..891: mol_type = other DNA
ttatctacgttggttttactacagaaactactgttctcagtaaaagcagagagagtacaatgccaacagctttgaaatcctctgtgctcttgtgccaatcccaccctcagaacagggagtctgtcggttatgttttcgtcctttacagttcttcgccgtctaatccattggaaacctcctttatttaaaggaaaccgtgtccaaattcagtgtacagaggtgcaaacctccgccccgctccttgtaggaagcccacgggaactgggccaatcggacggcgcttactcggctcatttacatacccataacacaccgcggctaatgcaaatattttcgtgaaaagatcttccattactcgaagttttaaaactaaaaacaaaatattatttcaaaagatcatgaagaaatttctgtcggtaacagcagtttcaattgataaatcaccatcacttatctaggaggttctgttactctagaagtgaattaagcaggacagctgtaatgatagggacttagggtgatagaagtgcaaagcatgactgtcaaatttttggagcaggttttctgacttcggtcggaaaacccctcctccggggatacaacgtgtttcctaaaagtagagggaggtaagagacggtagcacctgcggggcggcttgcacgccgagtgcctgtgacgcgccggcttaacttaactgcttccctgaagtaccttgaggttcctgatgtgcgggcggtagacggtaggcttatgcggcacgctgtcgtttccaccgtggctactgcgctttgggaaggccacgacctcctcctttggggaggtccttaggatctcagcttggcagtcgagtgggtggcgaccttttaaaggaatgggacccacccggagttc

SEQ ID NO: 780 - DNA, 1079 bp, synthetic construct
  source 1..1079: mol_type = other DNA
ttatctacgttggttttactacagaaactactgttctcagtaaaagcagagagagtacaatgccaacagctttgaaatcctctgtgctcttgtgccaatcccaccctcagaacagggagtctgtcggttatgttttcgtcctttacagttcttcgccgtctaatccattggaaacctcctttatttaaaggaaaccgtgtccaaattcagtgtacagaggtgcaaacctccgccccgctccttgtaggaagcccacgggaactgggccaatcggacggcgcttactcggctcatttacatacccataacacaccgcggctaatgcaaatattttcgtgaaaagatcttccattactcgaagttttaaaactaaaaacaaaatattatttcaaaagatcatgaagaaatttctgtcggtaacagcagtttcaattgataaatcaccatcacttatctaggaggttctgttactctagaagtgaattaagcaggacagctgtaatgatagggacttagggtgatagaagtgcaaagcatgactgtcaaatttttggagcaggttttctgacttcggtcggaaaacccctttcccttcttgtaatacaaaataataacaaccacagaggacatcgcaagtaaaatgtgtataacaaccccatctaaagaaccctatcatctttctactatctgtctacctaaatatgtatagtataaataaccctatatagcactctaagcaacttaagttaggtaacttagaaaactcttttttttttttgagactgagtctcactctgtcgcacccaggctggagtgcagtggcgtgatctcggctcactgcaacctccaccttctgggttcaagtgattctcccatctcagtctcccaagtagctgggattacaggcacgccaccatgccctgctacatttttttttttttagtagagatgaggtttcaccacattggccaggctgttctcgaactcctgacctcaggtgatccgcccaccttggcctcatgaagtgctgggattacaggtgtgagccactgtacccagccagaaaactcttaaaaaac

SEQ ID NO: 781 - DNA, 969 bp, synthetic construct
  source 1..969: mol_type = other DNA
ttatctacgttggttttactacagaaactactgttctcagtaaaagcagagagagtacaatgccaacagctttgaaatcctctgtgctcttgtgccaatcccaccctcagaacagggagtctgtcggttatgttttcgtcctttacagttcttcgccgtctaatccattggaaacctcctttatttaaaggaaaccgtgtccaaattcagtgtacagaggtgcaaacctccgccccgctccttgtaggaagcccacgggaactgggccaatcggacggcgcttactcggctcatttacatacccataacacaccgcggctaatgcaaatattttcgtgaaaagatcttccattactcgaagttttaaaactaaaaacaaaatattatttcaaaagatcatgaagaaatttctgtcggtaacagcagtttcaattgataaatcaccatcacttatctaggaggttctgttactctagaagtgaattaagcaggacagctgtaatgatagggacttagggtgatagaagtgcaaagcatgactgtcaaatttttggagcaggttttctgacttcggtcggaaaacccctctgaattttcttgcagttgaacaacagaggctttttttgtgtgtgtgggggtgcttggttttgggaggttgaagagtacttgttcgcaaactctctaaatgagagatggggaagtgtcttaccagctgattcgcgagagcacctgcaagtttacctgttttagtgatttgcgtttatgaaagttggagttgctgattttgtgatctctacttttaaggtaaaagcagggcggtgttgacttttcttgccagttggctgtcctgttttctttctcgcactgttttctttttgagacgaagtctgtcgctcaggctggagtgcactggcgtgatctcggctcgctgcaaactttgccgaacccctgtttagcgatttccgtttg

SEQ ID NO: 782 - DNA, 1087 bp, synthetic construct
  source 1..1087: mol_type = other DNA
ttatctacgttggttttactacagaaactactgttctcagtaaaagcagagagagtacaatgccaacagctttgaaatcctctgtgctcttgtgccaatcccaccctcagaacagggagtctgtcggttatgttttcgtcctttacagttcttcgccgtctaatccattggaaacctcctttatttaaaggaaaccgtgtccaaattcagtgtacagaggtgcaaacctccgccccgctccttgtaggaagcccacgggaactgggccaatcggacggcgcttactcggctcatttacatacccataacacaccgcggctaatgcaaatattttcgtgaaaagatcttccattactcgaagttttaaaactaaaaacaaaatattatttcaaaagatcatgaagaaatttctgtcggtaacagcagtttcaattgataaatcaccatcacttatctaggaggttctgttactctagaagtgaattaagcaggacagctgtaatgatagggacttagggtgatagaagtgcaaagcatgactgtcaaatttttggagcaggttttctgacttcggtcggaaaacccctatatgtggtaatccaacaatagaaattatttttaagtttgtgtgttcctttttctgttcaatggtgcttttgatattgttgtaaagcagtgactagcagattctgtgtggtaaaagcactgaaccctgtttagttcttttctccctaccttattggtaattatttctgtgtatatatgttccaaagaaatgcggcttgtatattcatgcttttcaactttttgtgatagacagttgatacacaagtagtacctcctccgggatcttcttagtcaagactgtttggtagatgcatgttttttgttacttgtaatgtacagtattcagttcattttctttttgcagcactgtccggttgaaacacaacgcgaggatcgggcgtggtggctcacgcctgtaatcccagcactttgggaggccgaggcaggacaatcaagaccaatcctggtcatcaaggcaggagaatcaagaccatcgaggtcaggagatcaagaccatcct

SEQ ID NO: 783 - DNA, 1085 bp, synthetic construct
  source 1..1085: mol_type = other DNA
ttatctacgttggttttactacagaaactactgttctcagtaaaagcagagagagtacaatgccaacagctttgaaatcctctgtgctcttgtgccaatcccaccctcagaacagggagtctgtcggttatgttttcgtcctttacagttcttcgccgtctaatccattggaaacctcctttatttaaaggaaaccgtgtccaaattcagtgtacagaggtgcaaacctccgccccgctccttgtaggaagcccacgggaactgggccaatcggacggcgcttactcggctcatttacatacccataacacaccgcggctaatgcaaatattttcgtgaaaagatcttccattactcgaagttttaaaactaaaaacaaaatattatttcaaaagatcatgaagaaatttctgtcggtaacagcagtttcaattgataaatcaccatcacttatctaggaggttctgttactctagaagtgaattaagcaggacagctgtaatgatagggacttagggtgatagaagtgcaaagcatgactgtcaaatttttggagcaggttttctgacttcggtcggaaaacccctacatcaggttgtttttctgtttttacatcaggttgtttttctgtttggttttttttttacaccacgtttatacgccggtgcacggtttaccactgaaaacacctttcatctacaggtgatatcttttaacacaaataaaatgtagtagtcctaggagacggaatagaaggaggtggggcctaggcagattcatctctgcggtgcattttgcctctggccctcgggccctagtttgcgatctttcccatcttgcctctgcttccctctgcacaatcctgagtattgcagtaccttacacttaaggaaatttcgtcttgccaaagttgatccatttcagctccgaaacataacaggaactagtgcaacgataaacgtatgaggaacttgcaataagagtgacagaatcctttgaatcaaaaaaaaaaaaagccaccacttaatgagtatctaccatatgtcaagggcttcaccaatatttcattgaaatattccagacca

SEQ ID NO: 784 - DNA, 1087 bp, synthetic construct
  source 1..1087: mol_type = other DNA
ttatctacgttggttttactacagaaactactgttctcagtaaaagcagagagagtacaatgccaacagctttgaaatcctctgtgctcttgtgccaatcccaccctcagaacagggagtctgtcggttatgttttcgtcctttacagttcttcgccgtctaatccattggaaacctcctttatttaaaggaaaccgtgtccaaattcagtgtacagaggtgcaaacctccgccccgctccttgtaggaagcccacgggaactgggccaatcggacggcgcttactcggctcatttacatacccataacacaccgcggctaatgcaaatattttcgtgaaaagatcttccattactcgaagttttaaaactaaaaacaaaatattatttcaaaagatcatgaagaaatttctgtcggtaacagcagtttcaattgataaatcaccatcacttatctaggaggttctgttactctagaagtgaattaagcaggacagctgtaatgatagggacttagggtgatagaagtgcaaagcatgactgtcaaatttttggagcaggttttctgacttcggtcggaaaacccctcttatgatgtttgttgccaatgatagattgttttcactgtgcaaaaattatgggtagttttggtggtcttgatgcagttgtaagcttggggtatgaaggtttgggccacgcctgggcgcttccggctgcgccggatgctgtttcctttccgctcccaggggcgttgggaacggttgtaggacgtggctctttattcgtgagttttccatttacctccgctgaacctagagcttcagacgccctatggcgtccgcctcgacccaaccggcggccttgagcgctgagcaagcaaagggtgagaatcgtcctagtcaaggcataggctgctggcctggggtagtcaaggcatgggctgctggtctggggaggatgcgggcggaggatgtggggcgacaaacctggctacgtccgccgggaaaatggggtaggggacgccgggtaccgtccttctaagtggggcgcttgcccccaagacttgggatcttattgggttacctaca

SEQ ID NO: 785 - DNA, 1085 bp, synthetic construct
  source 1..1085: mol_type = other DNA
ttatctacgttggttttactacagaaactactgttctcagtaaaagcagagagagtacaatgccaacagctttgaaatcctctgtgctcttgtgccaatcccaccctcagaacagggagtctgtcggttatgttttcgtcctttacagttcttcgccgtctaatccattggaaacctcctttatttaaaggaaaccgtgtccaaattcagtgtacagaggtgcaaacctccgccccgctccttgtaggaagcccacgggaactgggccaatcggacggcgcttactcggctcatttacatacccataacacaccgcggctaatgcaaatattttcgtgaaaagatcttccattactcgaagttttaaaactaaaaacaaaatattatttcaaaagatcatgaagaaatttctgtcggtaacagcagtttcaattgataaatcaccatcacttatctaggaggttctgttactctagaagtgaattaagcaggacagctgtaatgatagggacttagggtgatagaagtgcaaagcatgactgtcaaatttttggagcaggttttctgacttcggtcggaaaaccccttctttactgttatatgttaggcgaaatattacgcgtttggagtaagtggtgctttttgtaactgaaaagagattctgtgtgtgtttttttttttttagaggctgcatagttatttgtatgaaccgcaggtgacctaattagcaaggtaattcagacctgtatcctagcacttaagaagtggaagtgggataaccctgcgtgttctcgtgtgggaggctagcttaagcaacaaagcaggaaggccccaccaacaaaagaatttaaaaattatacgtgcgtggtggcgcgcgtatgaggaaattatttggcaactgtgttacagtatagcagcaaatggaatagacctagtccctgactttaggagacctgcctcagccccccgaatggctgggactacaggcgtgcgcctccgcgcccagctaatttttgcatttttggtagagacgggttcaccatgttggccaggatggtctccatctcttcatctggtgatccgcc

SEQ ID NO: 786 - DNA, 1087 bp, synthetic construct
  source 1..1087: mol_type = other DNA
ttatctacgttggttttactacagaaactactgttctcagtaaaagcagagagagtacaatgccaacagctttgaaatcctctgtgctcttgtgccaatcccaccctcagaacagggagtctgtcggttatgttttcgtcctttacagttcttcgccgtctaatccattggaaacctcctttatttaaaggaaaccgtgtccaaattcagtgtacagaggtgcaaacctccgccccgctccttgtaggaagcccacgggaactgggccaatcggacggcgcttactcggctcatttacatacccataacacaccgcggctaatgcaaatattttcgtgaaaagatcttccattactcgaagttttaaaactaaaaacaaaatattatttcaaaagatcatgaagaaatttctgtcggtaacagcagtttcaattgataaatcaccatcacttatctaggaggttctgttactctagaagtgaattaagcaggacagctgtaatgatagggacttagggtgatagaagtgcaaagcatgactgtcaaatttttggagcaggttttctgacttcggtcggaaaacccctaccttattcacgcctaaaaagtagactgactgtggggtggtcgtgttttttgtttcttgttggtaggtggtgaatgcgtttttttcgttgttttctccgttactcaggctgccagttgcttggcagtcttgtcgctggctgtggacgctctgcacttcatcaccgtccccagctgcgctttgagccggtctaaggttgcccacagtattgacgttgggacccacgaaactggcaatttccatgtgtgcggccttacccagttctcccaaacttctgcgtataaccgcttctctgtgcttcagaaagataagtccggccccggcctcacacagcagctcagttcgtgacagcgtttaatatgtaaaatggagcaaataatttatagggcgttgggagagttaaagagactaattcatttacgtgttaaatacagggaatggcttttgcattgatataaccccagcctccagcatgcgccagacctgacgtaggtgttcggc

SEQ ID NO: 787 - DNA, 1087 bp, synthetic construct
  source 1..1087: mol_type = other DNA
ttatctacgttggttttactacagaaactactgttctcagtaaaagcagagagagtacaatgccaacagctttgaaatcctctgtgctcttgtgccaatcccaccctcagaacagggagtctgtcggttatgttttcgtcctttacagttcttcgccgtctaatccattggaaacctcctttatttaaaggaaaccgtgtccaaattcagtgtacagaggtgcaaacctccgccccgctccttgtaggaagcccacgggaactgggccaatcggacggcgcttactcggctcatttacatacccataacacaccgcggctaatgcaaatattttcgtgaaaagatcttccattactcgaagttttaaaactaaaaacaaaatattatttcaaaagatcatgaagaaatttctgtcggtaacagcagtttcaattgataaatcaccatcacttatctaggaggttctgttactctagaagtgaattaagcaggacagctgtaatgatagggacttagggtgatagaagtgcaaagcatgactgtcaaatttttggagcaggttttctgacttcggtcggaaaaccccttttgacccattacccatctaagttagatgcttttttaaatgttttttaatttttaaatttttaatttttttcattatttattttttatttttgagacggatctcggctcactgtaacctccacctcccgggttcaagcgattctcctgactcagcctcccgagtagctgggattacaggcgcgcgccaccatgcccggctaatttttctatttttagtaaagacggggtttcgccatgttgaccagggtggtcttgaactcctgacgtcaggtgatcctcctgcctcgtgctgggattgcaggcgtgagccaccgctcccggcccttagatgctttttaatcagcaagtacgcaatgctttcctgacaggaatgtcaagtccgtcaggaaatccacataagggtgttaagcaggcaaagtaccacatacagattaaaatcaaaagcactgtcaacgcttatttaatttatacagtagaccctaacttttctaattttgtg

SEQ ID NO: 788 - DNA, 1087 bp, synthetic construct
  source 1..1087: mol_type = other DNA
ttatctacgttggttttactacagaaactactgttctcagtaaaagcagagagagtacaatgccaacagctttgaaatcctctgtgctcttgtgccaatcccaccctcagaacagggagtctgtcggttatgttttcgtcctttacagttcttcgccgtctaatccattggaaacctcctttatttaaaggaaaccgtgtccaaattcagtgtacagaggtgcaaacctccgccccgctccttgtaggaagcccacgggaactgggccaatcggacggcgcttactcggctcatttacatacccataacacaccgcggctaatgcaaatattttcgtgaaaagatcttccattactcgaagttttaaaactaaaaacaaaatattatttcaaaagatcatgaagaaatttctgtcggtaacagcagtttcaattgataaatcaccatcacttatctaggaggttctgttactctagaagtgaattaagcaggacagctgtaatgatagggacttagggtgatagaagtgcaaagcatgactgtcaaatttttggagcaggttttctgacttcggtcggaaaacccctgtttacttggttttaaaaatagcttgcactagcgataccgcgaatatggttattaggtttgttaggcacagtcgtgtcttactatagaaaaataacgtagtgttcattttgctgcctgtatgtgttaatttgtccttattgcgccattgttcttgttaagtcttctgtaaggagttgcgggtttcaaactgtcagtctgagagcataagctcacttttcagtcagttgaattgaatgttacattcgattggttctggatattgatattacccaaggcttgtcctgtttgtaagtcttttcctacacctgacaatatgattatgtttacaatgtccctagaactctgggtgtatcgttcccactgaataaaatttgatctctaagttgacctataaatttaagtaccaaaaaactggtttgtaagattttggaaggcagaggcagggaagagaccaacgtggtctacatataaagtaccaggtacatataaagtaccaggt

SEQ ID NO: 789 - DNA, 1083 bp, synthetic construct
  source 1..1083: mol_type = other DNA
ttatctacgttggttttactacagaaactactgttctcagtaaaagcagagagagtacaatgccaacagctttgaaatcctctgtgctcttgtgccaatcccaccctcagaacagggagtctgtcggttatgttttcgtcctttacagttcttcgccgtctaatccattggaaacctcctttatttaaaggaaaccgtgtccaaattcagtgtacagaggtgcaaacctccgccccgctccttgtaggaagcccacgggaactgggccaatcggacggcgcttactcggctcatttacatacccataacacaccgcggctaatgcaaatattttcgtgaaaagatcttccattactcgaagttttaaaactaaaaacaaaatattatttcaaaagatcatgaagaaatttctgtcggtaacagcagtttcaattgataaatcaccatcacttatctaggaggttctgttactctagaagtgaattaagcaggacagctgtaatgatagggacttagggtgatagaagtgcaaagcatgactgtcaaatttttggagcaggttttctgacttcggtcggaaaacccctatttttgtggtgctaaaagttagattgcattccgcccttctcacgtctctttacgtgttgtttgcgaggcgtggcctcggaggtaaatggtctccttttacctcagataagcttacctttgctctgtgagtaagaatgtagctacacttccaaatttagctattgtcctttgcggtccaaatgaaaatattaccttccgatctaacaatgttaaactagtcccaggcccttctatcgattgccagaatagactagactactacacagacacaccctctcaaatcaggccagctcctgcaacctgcacctacagtttgtcccctgggacaaatgaaaggacaggccctctttcccccccccccccaaatcagagcacacacagatcttggggtctggggcagaaatttcgttcatggaaaaaacaaacaaacaaacaaacacgatcaaaggaagctcgttccctttggcctcagggtttcttagacgccgtgttccc

SEQ ID NO: 790 - DNA, 1084 bp, synthetic construct
  source 1..1084: mol_type = other DNA
ttatctacgttggttttactacagaaactactgttctcagtaaaagcagagagagtacaatgccaacagctttgaaatcctctgtgctcttgtgccaatcccaccctcagaacagggagtctgtcggttatgttttcgtcctttacagttcttcgccgtctaatccattggaaacctcctttatttaaaggaaaccgtgtccaaattcagtgtacagaggtgcaaacctccgccccgctccttgtaggaagcccacgggaactgggccaatcggacggcgcttactcggctcatttacatacccataacacaccgcggctaatgcaaatattttcgtgaaaagatcttccattactcgaagttttaaaactaaaaacaaaatattatttcaaaagatcatgaagaaatttctgtcggtaacagcagtttcaattgataaatcaccatcacttatctaggaggttctgttactctagaagtgaattaagcaggacagctgtaatgatagggacttagggtgatagaagtgcaaagcatgactgtcaaatttttggagcaggttttctgacttcggtcggaaaacccctataactggtaaccaaaagcagattactttcccccttgtggtcttcgcgtttgcggacgggagagaactttcggccattttccttttagaaatttaacttcttgaaggccaccaggtgacccttacttccctctcacctttccttctacctgtactttctctattaaaaagcctgcagaagtacccttgacaaattgccaaaaatgacacctaaaaaaaaaaaaaggaaaaacgacaccttaggtaattataggttgtaagaaaaagatttgacctcttggagtttttatttcttaataccaaaggacacccaaggaacgtatctctcaaaattgggtttcaaacctcagccgtttccttcttagttccagtgcttaacacgcaacagacctgcacaccactacactgcatacgagttttaaagttaataaatcagtcacccctccatagtcttctacctacttgaagacagaaacggctgctaggaagcaattcttc

SEQ ID NO: 791 - DNA, 1087 bp, synthetic construct
  source 1..1087: mol_type = other DNA
ttatctacgttggttttactacagaaactactgttctcagtaaaagcagagagagtacaatgccaacagctttgaaatcctctgtgctcttgtgccaatcccaccctcagaacagggagtctgtcggttatgttttcgtcctttacagttcttcgccgtctaatccattggaaacctcctttatttaaaggaaaccgtgtccaaattcagtgtacagaggtgcaaacctccgccccgctccttgtaggaagcccacgggaactgggccaatcggacggcgcttactcggctcatttacatacccataacacaccgcggctaatgcaaatattttcgtgaaaagatcttccattactcgaagttttaaaactaaaaacaaaatattatttcaaaagatcatgaagaaatttctgtcggtaacagcagtttcaattgataaatcaccatcacttatctaggaggttctgttactctagaagtgaattaagcaggacagctgtaatgatagggacttagggtgatagaagtgcaaagcatgactgtcaaatttttggagcaggttttctgacttcggtcggaaaacccctctggggaataagagtggtttaaagaaagaacaatttgagagatctgcttagatctaataaaacccaagtatagtttctttagacgtcttatatctcacgtaggacctcttatttcagactcactgcaagaacaagctaaagaactatatacagtcaggaacaaggtgagccatcgcggttctcagtcccatgatcttaagagtttttcctcttcccctcttccctggctgtcctggagctcactctgtagaccaggctggtctcaaactcagaaatccacttacctctgcctcccaagggctgggattaaaggcatgcaccaccattgcccggcagggtatgtggactatgctgtccttcaactcagagatcgtggtactttaaatctcattttccgaaagaaaagaaaagaaaggaaggggggaaataaagccagtatattttgcacccacaatctgaagttctacaaatattgttagaaaatgcaaaggacccaagtc

SEQ ID NO: 792 - DNA, 1087 bp, synthetic construct
  source 1..1087: mol_type = other DNA
ttatctacgttggttttactacagaaactactgttctcagtaaaagcagagagagtacaatgccaacagctttgaaatcctctgtgctcttgtgccaatcccaccctcagaacagggagtctgtcggttatgttttcgtcctttacagttcttcgccgtctaatccattggaaacctcctttatttaaaggaaaccgtgtccaaattcagtgtacagaggtgcaaacctccgccccgctccttgtaggaagcccacgggaactgggccaatcggacggcgcttactcggctcatttacatacccataacacaccgcggctaatgcaaatattttcgtgaaaagatcttccattactcgaagttttaaaactaaaaacaaaatattatttcaaaagatcatgaagaaatttctgtcggtaacagcagtttcaattgataaatcaccatcacttatctaggaggttctgttactctagaagtgaattaagcaggacagctgtaatgatagggacttagggtgatagaagtgcaaagcatgactgtcaaatttttggagcaggttttctgacttcggtcggaaaacccctctcggtttatcttaaagggttttaaatatagaaagcttccttagtcttatgggtgagagtgctgtttaagccttacctaggtatgtctttgaacatttattacagattgttatttgtgactatgaccactcaggtgttctgttcttgtgaatttagacacactcagaaaggctacacactcaaagaccacaccaaagtgaagtactatctgggccgtgaaactggtcacatatcagttattttgcagtaaaacaaggaagtcaatcatactgcttcagtgggtcagggagtcaagaatgcacagtacaagagctggtgagattcctcagcaggtaagagcactgaatgctcttccaaagattctgagttcaaatcccagcaaccacgtggtggatttgaacaaaggatgaaaacaaccatccataaccagatctgatgccctcttctggagtgtcaaaagacagctatggtgtacttacataaataaataagtaaaaaca

SEQ ID NO: 793 - DNA, 1087 bp, synthetic construct
  source 1..1087: mol_type = other DNA
ttatctacgttggttttactacagaaactactgttctcagtaaaagcagagagagtacaatgccaacagctttgaaatcctctgtgctcttgtgccaatcccaccctcagaacagggagtctgtcggttatgttttcgtcctttacagttcttcgccgtctaatccattggaaacctcctttatttaaaggaaaccgtgtccaaattcagtgtacagaggtgcaaacctccgccccgctccttgtaggaagcccacgggaactgggccaatcggacggcgcttactcggctcatttacatacccataacacaccgcggctaatgcaaatattttcgtgaaaagatcttccattactcgaagttttaaaactaaaaacaaaatattatttcaaaagatcatgaagaaatttctgtcggtaacagcagtttcaattgataaatcaccatcacttatctaggaggttctgttactctagaagtgaattaagcaggacagctgtaatgatagggacttagggtgatagaagtgcaaagcatgactgtcaaatttttggagcaggttttctgacttcggtcggaaaacccctccacattttgtgtttaaaaatagaaatatttaagtgagatcagtttaaatctgctttatctagggtgtctaactgcttgcatctttttaacttttccttatttgtgagaaggtctgtaaaacttattatatgttagtacactgtagctgtcttcagacactccagaagagggattcagatcaccttacagatggttttgagccaccatgtggttgctgggatttgaactcaggacctttagaaaagtagttgggtgctcttacccgctgagccatctcaccagccctttttttttcttttttccagttcgggtttctctgtgtgtagccctggctgtcctggaactcattctgtagaccgggctggcctcgaactcagaaatctgcctgcctctgcctcccaagtgctgggattaaaggaatgtgccttcattgcccggctctagggctttttgttgttgtttgtttgtttgtttgtttgtttgcttttgtggatggcct

SEQ ID NO: 794 - DNA, 1087 bp, synthetic construct
  source 1..1087: mol_type = other DNA
ttatctacgttggttttactacagaaactactgttctcagtaaaagcagagagagtacaatgccaacagctttgaaatcctctgtgctcttgtgccaatcccaccctcagaacagggagtctgtcggttatgttttcgtcctttacagttcttcgccgtctaatccattggaaacctcctttatttaaaggaaaccgtgtccaaattcagtgtacagaggtgcaaacctccgccccgctccttgtaggaagcccacgggaactgggccaatcggacggcgcttactcggctcatttacatacccataacacaccgcggctaatgcaaatattttcgtgaaaagatcttccattactcgaagttttaaaactaaaaacaaaatattatttcaaaagatcatgaagaaatttctgtcggtaacagcagtttcaattgataaatcaccatcacttatctaggaggttctgttactctagaagtgaattaagcaggacagctgtaatgatagggacttagggtgatagaagtgcaaagcatgactgtcaaatttttggagcaggttttctgacttcggtcggaaaacccctaaaaccagtaagggagaaaggtcaagtaacatataaaggaaggcctatcagaattacaccagacttttcaccagagactatgaaagccagaagagcctggacagatgttatacagacactaagagaacacaaatgccagcccaggctactatacctggccaaactctcaattaccatagatggagaaaccaaagtattccacgacaaaaacaaattcacacaatatctttccacgaatccagcccttcaaaggataatgacagaaaagaagcaatacaaggacggaaatcacgccctagaacaaccaagaaactaatcattcaacaaaccaaaaagaagacagccacaagaacagaatgccaactctaacaacaaaaataaaaggaagcaacaattacttttccttaatatctcttaatatcaatggactcaattccccaataaaaagacatagactaacagactggctacacaaacaggacccaacattctgctgctta

SEQ ID NO: 795 - DNA, 1087 bp, synthetic construct
  source 1..1087: mol_type = other DNA
ttatctacgttggttttactacagaaactactgttctcagtaaaagcagagagagtacaatgccaacagctttgaaatcctctgtgctcttgtgccaatcccaccctcagaacagggagtctgtcggttatgttttcgtcctttacagttcttcgccgtctaatccattggaaacctcctttatttaaaggaaaccgtgtccaaattcagtgtacagaggtgcaaacctccgccccgctccttgtaggaagcccacgggaactgggccaatcggacggcgcttactcggctcatttacatacccataacacaccgcggctaatgcaaatattttcgtgaaaagatcttccattactcgaagttttaaaactaaaaacaaaatattatttcaaaagatcatgaagaaatttctgtcggtaacagcagtttcaattgataaatcaccatcacttatctaggaggttctgttactctagaagtgaattaagcaggacagctgtaatgatagggacttagggtgatagaagtgcaaagcatgactgtcaaatttttggagcaggttttctgacttcggtcggaaaacccctcccaatttcactggtctacaatgaaagcaaaacagttctcttccccgctccccggtgtgtgagaggggctttgatccttctctggtttcctaggaaacgcgtatgtgctagagccacgctctgagacttccgcctcgtgcggtcccgcttcctttctgcctcctctggcctgcatccgtgggggaggtggctggctgcagggttctccggatctcttctgtgttcccactactcaagcaccgagtggcgttctatggcgtccgcctcggctcagcccgcggccctgagcgcggagcaggccaagggtgaggaaagagcctagtctgggtgtgggccgtcttctggggggagggcgcgatactattctttgcctctccaagtggggcccttgcccattagggcgaagggttgggaggacaagcttatcgggttgcttgcaggcctcggcccactaattccctgcctcttccctcctctgggctcgcccgccgtcctccgcg

SEQ ID NO: 796 - DNA, 1087 bp, synthetic construct
  source 1..1087: mol_type = other DNA
ttatctacgttggttttactacagaaactactgttctcagtaaaagcagagagagtacaatgccaacagctttgaaatcctctgtgctcttgtgccaatcccaccctcagaacagggagtctgtcggttatgttttcgtcctttacagttcttcgccgtctaatccattggaaacctcctttatttaaaggaaaccgtgtccaaattcagtgtacagaggtgcaaacctccgccccgctccttgtaggaagcccacgggaactgggccaatcggacggcgcttactcggctcatttacatacccataacacaccgcggctaatgcaaatattttcgtgaaaagatcttccattactcgaagttttaaaactaaaaacaaaatattatttcaaaagatcatgaagaaatttctgtcggtaacagcagtttcaattgataaatcaccatcacttatctaggaggttctgttactctagaagtgaattaagcaggacagctgtaatgatagggacttagggtgatagaagtgcaaagcatgactgtcaaatttttggagcaggttttctgacttcggtcggaaaacccctgaatttgttaaattacaggaggaagcttttttagttcattttacaaatactttcttgttaggtagataataccttctaaggttattatctggatcttctaagtctttttatcgctagcaagtctaagtttctggactttggaattagaagttaatgtcgtaggcgggcatggtggtccacgcctttaatcccagagtttgggaggcagacgcaggtggttttctgagttcgaggccatcctgctcttcaatgttagttccaggacagccagggttatacaaagaaaccctgtctcgagaaacaaaacaaacaaaaaaagagtagctgagtgctctgagttgtctctccagccccttagctatttattttcatttaaattatttttgttttattcgcttgtgtgcctgagtttgaatttcccgggattaacagttgaagactagggctggtgagatggctcagcggttaagattgccgactgctcttccaaaggtcctgag

SEQ ID NO: 797 - DNA, 1087 bp, synthetic construct
  source 1..1087: mol_type = other DNA
ttatctacgttggttttactacagaaactactgttctcagtaaaagcagagagagtacaatgccaacagctttgaaatcctctgtgctcttgtgccaatcccaccctcagaacagggagtctgtcggttatgttttcgtcctttacagttcttcgccgtctaatccattggaaacctcctttatttaaaggaaaccgtgtccaaattcagtgtacagaggtgcaaacctccgccccgctccttgtaggaagcccacgggaactgggccaatcggacggcgcttactcggctcatttacatacccataacacaccgcggctaatgcaaatattttcgtgaaaagatcttccattactcgaagttttaaaactaaaaacaaaatattatttcaaaagatcatgaagaaatttctgtcggtaacagcagtttcaattgataaatcaccatcacttatctaggaggttctgttactctagaagtgaattaagcaggacagctgtaatgatagggacttagggtgatagaagtgcaaagcatgactgtcaaatttttggagcaggttttctgacttcggtcggaaaacccctaccccctaattctacaagaatagaaagcttagcagctcctctgaatggttgctctcaggtgctagtggttgcaagtcgtatgttgatgcctgcctttgccctacctggtgtgtgagcgtgagcgcgccccacctctccagcctctctcttactgtttttcagacaagatgggactgttgttctcctactgctatgtacctcaatttcaattgatcatgcctggacataactgcccatgttgtaaggtcgtctacgttgtaaggtcgtgctcagtttctgatgcctagactagtcacctttccgtttgcctcctgactgtgtaaatgaggcaaatgaaggtggtctcttaactgacatgttagtgtttgacctatgggatagtttctcattgttgagacagaatttctagaagctggtccgctgagcggctaagagcacttgctgatattgcaaaggatctacctgggtttggttctcagcactcacatggaagttcacat

SEQ ID NO: 798 - DNA, 654 bp, synthetic construct
  source 1..654: mol_type = other DNA
ttatctacgttggttttactacagaaactactgttctcagtaaaagcagagagagtacaatgccaacagctttgaaatcctctgtgctcttgtgccaatcccaccctcagaacagggagtctgtcggttatgttttcgtcctttacagttcttcgccgtctaatccattggaaacctcctttatttaaaggaaaccgtgtccaaattcagtgtacagaggtgcaaacctccgccccgctccttgtaggaagcccacgggaactgggccaatcggacggcgcttactcggctcatttacatacccataacacaccgcggctaatgcaaatattttcgtgaaaagatcttccattactcgaagttttaaaactaaaaacaaaatattatttcaaaagatcatgaagaaatttctgtcggtaacagcagtttcaattgataaatcaccatcacttatctaggaggttctgttactctagaagtgaattaagcaggacagctgtaatgatagggacttagggtgatagaagtgcaaagcatgactgtcaaatttttggagcaggttttctgacttcggtcggaaaaccccttgtagttcctgcaatttaattttcgtttaaaactttattttattctttaacttaaaaaaaatatata

SEQ ID NO: 799 - DNA, 1087 bp, synthetic construct
  source 1..1087: mol_type = other DNA
ggcatgtgattttgttttgtttaggtttttttttaactttatttgatcaacatgaaataatacaataagctatgtcttctaaccagcaggcagccagccaggagccatgtgtagcagtgttagaagctgcagcaggcatgtgggtaattgtggggagcttttaggaacagctagggagctgtgtggagctgcagagatgcagaggagcctggaggaacagaccagtgctgtgggctgggaggagcccccctcacaggtacttgctcaacggctccacgaccataagccttgaataagttacatggacattttacaaatggcacaggattgattatgtctgctgccagaagcctcatgtcgataaggagagagctggccaaaaggtaaagtatgctagctccatacagtgcaatagccacgtagtctcacagagaaagaggcaggcctgcatcatatccaaatatggccaagaattttattaaattaaaatgcaaacagcaaatgatagggacttagggtgatagaagtgcaaagcatgactgtcaaatttttggagcaggttttctgacttcggtcggaaaacccctactttctggagtttcaaaaacagactgtacgccaagggtcatatctttttttgtattggtttgtgtcttggttggtgtcttaggtgttaatcctacagtggagggtttatgggaataggaagtaacatgtcgcctgcatgtcataggagaaaaagcgagcatcagccgtatcggctttgtaacacaaattagctatcgtgaagtccgctcagctcttccctttctaccctggctgctttttgcagggattggtccgtggtctccagtctcttgggttctcaccctgtgtgaaaatcttcgtgtttttccctaccccccagtcacctcttacacagcctctgcttccaagcgcagcccccacaggagtttgtaggatttctgtgctagcggggaatgtgttctcacctcatagagccaggtagaaattatgcagatgggcagttctctgggaagaaagcagggcctttggggctctcagtgtccccgttgggttgtagaca

SEQ ID NO: 800 - DNA, 1087 bp, synthetic construct
  source 1..1087: mol_type = other DNA
ggcatgtgattttgttttgtttaggtttttttttaactttatttgatcaacatgaaataatacaataagctatgtcttctaaccagcaggcagccagccaggagccatgtgtagcagtgttagaagctgcagcaggcatgtgggtaattgtggggagcttttaggaacagctagggagctgtgtggagctgcagagatgcagaggagcctggaggaacagaccagtgctgtgggctgggaggagcccccctcacaggtacttgctcaacggctccacgaccataagccttgaataagttacatggacattttacaaatggcacaggattgattatgtctgctgccagaagcctcatgtcgataaggagagagctggccaaaaggtaaagtatgctagctccatacagtgcaatagccacgtagtctcacagagaaagaggcaggcctgcatcatatccaaatatggccaagaattttattaaattaaaatgcaaacagcaaatgatagggacttagggtgatagaagtgcaaagcatgactgtcaaatttttggagcaggttttctgacttcggtcggaaaacccctactttctggagtttctaaaagtagactgtacgctaagggtcatatctttttttgttttggtttgtgtcttggttggcgtcttaaatgttaatcctacagtggagggctggcgaataggaagtaacatgtcgcctgcacgccataggagaaaaagcgagcatcagccgtatcggctttgtaacacaaattagctatcgtgaagtccgctcagctcttccctttctaccctggctgctttttgcagggattggtccgtggtctccagtctcttgggttctcaccctgtgtgaaaatcttcctgtttttccctaccccccaagtcacctcttacacagcctctgcttccaagcgcagcccccacaggagtttgtaggatttctgtgctagcggggagtgtgttctcacctcatagagccaggtagaaactacgcagatgggtgctgttctccaggaagaaagcagggcctttggggctctcagtgtccccgttgggttgtaga

SEQ ID NO: 801 - DNA, 1087 bp, synthetic construct
  source 1..1087: mol_type = other DNA
ggcatgtgattttgttttgtttaggtttttttttaactttatttgatcaacatgaaataatacaataagctatgtcttctaaccagcaggcagccagccaggagccatgtgtagcagtgttagaagctgcagcaggcatgtgggtaattgtggggagcttttaggaacagctagggagctgtgtggagctgcagagatgcagaggagcctggaggaacagaccagtgctgtgggctgggaggagcccccctcacaggtacttgctcaacggctccacgaccataagccttgaataagttacatggacattttacaaatggcacaggattgattatgtctgctgccagaagcctcatgtcgataaggagagagctggccaaaaggtaaagtatgctagctccatacagtgcaatagccacgtagtctcacagagaaagaggcaggcctgcatcatatccaaatatggccaagaattttattaaattaaaatgcaaacagcaaatgatagggacttagggtgatagaagtgcaaagcatgactgtcaaatttttggagcaggttttctgacttcggtcggaaaacccctactttctggagtttcaaaaacagaccgtacgccaagggtcatgtcttttttcgtattggtttgtgtcttagttgttaatcctacagtggaggcctggggaataagaagtaacatgtggcctgcacgccataggagaaaaagcgagcatcagccgtatcggctttgtaacacaaattagctatcgtgaagtccgctcagctcttccatttctaccctggctgctttttgcagggattggtccgtggtctccagtctcttgggttctcaccctgtgtgaaaatcttcgtgtttttccctaccccccaagtcacctcttacacagcctctgcttccaagcgcagcccccacaggagtttgtaggatttctgtgctagcggggagtgtgttctcacctcatagagccaggtagaaattatgcagatgggcgctgttctctgggaagaaagcagggcctttggggctctcagtgtccccgttgggttgtagacataacactctta

SEQ ID NO: 802 - DNA, 891 bp, synthetic construct
  source 1..891: mol_type = other DNA
ggcatgtgattttgttttgtttaggtttttttttaactttatttgatcaacatgaaataatacaataagctatgtcttctaaccagcaggcagccagccaggagccatgtgtagcagtgttagaagctgcagcaggcatgtgggtaattgtggggagcttttaggaacagctagggagctgtgtggagctgcagagatgcagaggagcctggaggaacagaccagtgctgtgggctgggaggagcccccctcacaggtacttgctcaacggctccacgaccataagccttgaataagttacatggacattttacaaatggcacaggattgattatgtctgctgccagaagcctcatgtcgataaggagagagctggccaaaaggtaaagtatgctagctccatacagtgcaatagccacgtagtctcacagagaaagaggcaggcctgcatcatatccaaatatggccaagaattttattaaattaaaatgcaaacagcaaatgatagggacttagggtgatagaagtgcaaagcatgactgtcaaatttttggagcaggttttctgacttcggtcggaaaacccctcctccggggatacaacgtgtttcctaaaagtagagggaggtaagagacggtagcacctgcggggcggcttgcacgccgagtgcctgtgacgcgccggcttaacttaactgcttccctgaagtaccttgaggttcctgatgtgcgggcggtagacggtaggcttatgcggcacgctgtcgtttccaccgtggctactgcgctttgggaaggccacgacctcctcctttggggaggtccttaggatctcagcttggcagtcgagtgggtggcgaccttttaaaggaatgggacccacccggagttc

SEQ ID NO: 803 - DNA, 1079 bp, synthetic construct
  source 1..1079: mol_type = other DNA
ggcatgtgattttgttttgtttaggtttttttttaactttatttgatcaacatgaaataatacaataagctatgtcttctaaccagcaggcagccagccaggagccatgtgtagcagtgttagaagctgcagcaggcatgtgggtaattgtggggagcttttaggaacagctagggagctgtgtggagctgcagagatgcagaggagcctggaggaacagaccagtgctgtgggctgggaggagcccccctcacaggtacttgctcaacggctccacgaccataagccttgaataagttacatggacattttacaaatggcacaggattgattatgtctgctgccagaagcctcatgtcgataaggagagagctggccaaaaggtaaagtatgctagctccatacagtgcaatagccacgtagtctcacagagaaagaggcaggcctgcatcatatccaaatatggccaagaattttattaaattaaaatgcaaacagcaaatgatagggacttagggtgatagaagtgcaaagcatgactgtcaaatttttggagcaggttttctgacttcggtcggaaaacccctttcccttcttgtaatacaaaataataacaaccacagaggacatcgcaagtaaaatgtgtataacaaccccatctaaagaaccctatcatctttctactatctgtctacctaaatatgtatagtataaataaccctatatagcactctaagcaacttaagttaggtaacttagaaaactcttttttttttttgagactgagtctcactctgtcgcacccaggctggagtgcagtggcgtgatctcggctcactgcaacctccaccttctgggttcaagtgattctcccatctcagtctcccaagtagctgggattacaggcacgccaccatgccctgctacatttttttttttttagtagagatgaggtttcaccacattggccaggctgttctcgaactcctgacctcaggtgatccgcccaccttggcctcatgaagtgctgggattacaggtgtgagccactgtacccagccagaaaactcttaaaaaac

SEQ ID NO: 804 - DNA, 969 bp, synthetic construct
  source 1..969: mol_type = other DNA
ggcatgtgattttgttttgtttaggtttttttttaactttatttgatcaacatgaaataatacaataagctatgtcttctaaccagcaggcagccagccaggagccatgtgtagcagtgttagaagctgcagcaggcatgtgggtaattgtggggagcttttaggaacagctagggagctgtgtggagctgcagagatgcagaggagcctggaggaacagaccagtgctgtgggctgggaggagcccccctcacaggtacttgctcaacggctccacgaccataagccttgaataagttacatggacattttacaaatggcacaggattgattatgtctgctgccagaagcctcatgtcgataaggagagagctggccaaaaggtaaagtatgctagctccatacagtgcaatagccacgtagtctcacagagaaagaggcaggcctgcatcatatccaaatatggccaagaattttattaaattaaaatgcaaacagcaaatgatagggacttagggtgatagaagtgcaaagcatgactgtcaaatttttggagcaggttttctgacttcggtcggaaaacccctctgaattttcttgcagttgaacaacagaggctttttttgtgtgtgtgggggtgcttggttttgggaggttgaagagtacttgttcgcaaactctctaaatgagagatggggaagtgtcttaccagctgattcgcgagagcacctgcaagtttacctgttttagtgatttgcgtttatgaaagttggagttgctgattttgtgatctctacttttaaggtaaaagcagggcggtgttgacttttcttgccagttggctgtcctgttttctttctcgcactgttttctttttgagacgaagtctgtcgctcaggctggagtgcactggcgtgatctcggctcgctgcaaactttgccgaacccctgtttagcgatttccgtttg

SEQ ID NO: 805 - DNA, 1087 bp, synthetic construct
  source 1..1087: mol_type = other DNA
ggcatgtgattttgttttgtttaggtttttttttaactttatttgatcaacatgaaataatacaataagctatgtcttctaaccagcaggcagccagccaggagccatgtgtagcagtgttagaagctgcagcaggcatgtgggtaattgtggggagcttttaggaacagctagggagctgtgtggagctgcagagatgcagaggagcctggaggaacagaccagtgctgtgggctgggaggagcccccctcacaggtacttgctcaacggctccacgaccataagccttgaataagttacatggacattttacaaatggcacaggattgattatgtctgctgccagaagcctcatgtcgataaggagagagctggccaaaaggtaaagtatgctagctccatacagtgcaatagccacgtagtctcacagagaaagaggcaggcctgcatcatatccaaatatggccaagaattttattaaattaaaatgcaaacagcaaatgatagggacttagggtgatagaagtgcaaagcatgactgtcaaatttttggagcaggttttctgacttcggtcggaaaacccctatatgtggtaatccaacaatagaaattatttttaagtttgtgtgttcctttttctgttcaatggtgcttttgatattgttgtaaagcagtgactagcagattctgtgtggtaaaagcactgaaccctgtttagttcttttctccctaccttattggtaattatttctgtgtatatatgttccaaagaaatgcggcttgtatattcatgcttttcaactttttgtgatagacagttgatacacaagtagtacctcctccgggatcttcttagtcaagactgtttggtagatgcatgttttttgttacttgtaatgtacagtattcagttcattttctttttgcagcactgtccggttgaaacacaacgcgaggatcgggcgtggtggctcacgcctgtaatcccagcactttgggaggccgaggcaggacaatcaagaccaatcctggtcatcaaggcaggagaatcaagaccatcgaggtcaggagatcaagaccatcct

SEQ ID NO: 806 - DNA, 1076 bp, synthetic construct
  source 1..1076: mol_type = other DNA
ttttgttttgtttaggtttttttttaactttatttgatcaacatgaaataatacaataagctatgtcttctaaccagcaggcagccagccaggagccatgtgtagcagtgttagaagctgcagcaggcatgtgggtaattgtggggagcttttaggaacagctagggagctgtgtggagctgcagagatgcagaggagcctggaggaacagaccagtgctgtgggctgggaggagcccccctcacaggtacttgctcaacggctccacgaccataagccttgaataagttacatggacattttacaaatggcacaggattgattatgtctgctgccagaagcctcatgtcgataaggagagagctggccaaaaggtaaagtatgctagctccatacagtgcaatagccacgtagtctcacagagaaagaggcaggcctgcatcatatccaaatatggccaagaattttattaaattaaaatgcaaacagcaaatgatagggacttagggtgatagaagtgcaaagcatgactgtcaaatttttggagcaggttttctgacttcggtcggaaaacccctacatcaggttgtttttctgtttttacatcaggttgtttttctgtttggttttttttttacaccacgtttatacgccggtgcacggtttaccactgaaaacacctttcatctacaggtgatatcttttaacacaaataaaatgtagtagtcctaggagacggaatagaaggaggtggggcctaggcagattcatctctgcggtgcattttgcctctggccctcgggccctagtttgcgatctttcccatcttgcctctgcttccctctgcacaatcctgagtattgcagtaccttacacttaaggaaatttcgtcttgccaaagttgatccatttcagctccgaaacataacaggaactagtgcaacgataaacgtatgaggaacttgcaataagagtgacagaatcctttgaatcaaaaaaaaaaaaagccaccacttaatgagtatctaccatatgtcaagggcttcaccaatatttcattgaaatattccagacca

SEQ ID NO: 807 - DNA, 1087 bp, synthetic construct
  source 1..1087: mol_type = other DNA
ggcatgtgattttgttttgtttaggtttttttttaactttatttgatcaacatgaaataatacaataagctatgtcttctaaccagcaggcagccagccaggagccatgtgtagcagtgttagaagctgcagcaggcatgtgggtaattgtggggagcttttaggaacagctagggagctgtgtggagctgcagagatgcagaggagcctggaggaacagaccagtgctgtgggctgggaggagcccccctcacaggtacttgctcaacggctccacgaccataagccttgaataagttacatggacattttacaaatggcacaggattgattatgtctgctgccagaagcctcatgtcgataaggagagagctggccaaaaggtaaagtatgctagctccatacagtgcaatagccacgtagtctcacagagaaagaggcaggcctgcatcatatccaaatatggccaagaattttattaaattaaaatgcaaacagcaaatgatagggacttagggtgatagaagtgcaaagcatgactgtcaaatttttggagcaggttttctgacttcggtcggaaaacccctcttatgatgtttgttgccaatgatagattgttttcactgtgcaaaaattatgggtagttttggtggtcttgatgcagttgtaagcttggggtatgaaggtttgggccacgcctgggcgcttccggctgcgccggatgctgtttcctttccgctcccaggggcgttgggaacggttgtaggacgtggctctttattcgtgagttttccatttacctccgctgaacctagagcttcagacgccctatggcgtccgcctcgacccaaccggcggccttgagcgctgagcaagcaaagggtgagaatcgtcctagtcaaggcataggctgctggcctggggtagtcaaggcatgggctgctggtctggggaggatgcgggcggaggatgtggggcgacaaacctggctacgtccgccgggaaaatggggtaggggacgccgggtaccgtccttctaagtggggcgcttgcccccaagacttgggatcttattgggttacctaca

SEQ ID NO: 808 - DNA, 1085 bp, synthetic construct
  source 1..1085: mol_type = other DNA
ggcatgtgattttgttttgtttaggtttttttttaactttatttgatcaacatgaaataatacaataagctatgtcttctaaccagcaggcagccagccaggagccatgtgtagcagtgttagaagctgcagcaggcatgtgggtaattgtggggagcttttaggaacagctagggagctgtgtggagctgcagagatgcagaggagcctggaggaacagaccagtgctgtgggctgggaggagcccccctcacaggtacttgctcaacggctccacgaccataagccttgaataagttacatggacattttacaaatggcacaggattgattatgtctgctgccagaagcctcatgtcgataaggagagagctggccaaaaggtaaagtatgctagctccatacagtgcaatagccacgtagtctcacagagaaagaggcaggcctgcatcatatccaaatatggccaagaattttattaaattaaaatgcaaacagcaaatgatagggacttagggtgatagaagtgcaaagcatgactgtcaaatttttggagcaggttttctgacttcggtcggaaaaccccttctttactgttatatgttaggcgaaatattacgcgtttggagtaagtggtgctttttgtaactgaaaagagattctgtgtgtgtttttttttttttagaggctgcatagttatttgtatgaaccgcaggtgacctaattagcaaggtaattcagacctgtatcctagcacttaagaagtggaagtgggataaccctgcgtgttctcgtgtgggaggctagcttaagcaacaaagcaggaaggccccaccaacaaaagaatttaaaaattatacgtgcgtggtggcgcgcgtatgaggaaattatttggcaactgtgttacagtatagcagcaaatggaatagacctagtccctgactttaggagacctgcctcagccccccgaatggctgggactacaggcgtgcgcctccgcgcccagctaatttttgcatttttggtagagacgggttcaccatgttggccaggatggtctccatctcttcatctggtgatccgcc

SEQ ID NO: 809 - DNA, 1087 bp, synthetic construct
  source 1..1087: mol_type = other DNA
ggcatgtgattttgttttgtttaggtttttttttaactttatttgatcaacatgaaataatacaataagctatgtcttctaaccagcaggcagccagccaggagccatgtgtagcagtgttagaagctgcagcaggcatgtgggtaattgtggggagcttttaggaacagctagggagctgtgtggagctgcagagatgcagaggagcctggaggaacagaccagtgctgtgggctgggaggagcccccctcacaggtacttgctcaacggctccacgaccataagccttgaataagttacatggacattttacaaatggcacaggattgattatgtctgctgccagaagcctcatgtcgataaggagagagctggccaaaaggtaaagtatgctagctccatacagtgcaatagccacgtagtctcacagagaaagaggcaggcctgcatcatatccaaatatggccaagaattttattaaattaaaatgcaaacagcaaatgatagggacttagggtgatagaagtgcaaagcatgactgtcaaatttttggagcaggttttctgacttcggtcggaaaacccctaccttattcacgcctaaaaagtagactgactgtggggtggtcgtgttttttgtttcttgttggtaggtggtgaatgcgtttttttcgttgttttctccgttactcaggctgccagttgcttggcagtcttgtcgctggctgtggacgctctgcacttcatcaccgtccccagctgcgctttgagccggtctaaggttgcccacagtattgacgttgggacccacgaaactggcaatttccatgtgtgcggccttacccagttctcccaaacttctgcgtataaccgcttctctgtgcttcagaaagataagtccggccccggcctcacacagcagctcagttcgtgacagcgtttaatatgtaaaatggagcaaataatttatagggcgttgggagagttaaagagactaattcatttacgtgttaaatacagggaatggcttttgcattgatataaccccagcctccagcatgcgccagacctgacgtaggtgttcggc

SEQ ID NO: 810 - DNA, 1087 bp, synthetic construct
  source 1..1087: mol_type = other DNA
ggcatgtgattttgttttgtttaggtttttttttaactttatttgatcaacatgaaataatacaataagctatgtcttctaaccagcaggcagccagccaggagccatgtgtagcagtgttagaagctgcagcaggcatgtgggtaattgtggggagcttttaggaacagctagggagctgtgtggagctgcagagatgcagaggagcctggaggaacagaccagtgctgtgggctgggaggagcccccctcacaggtacttgctcaacggctccacgaccataagccttgaataagttacatggacattttacaaatggcacaggattgattatgtctgctgccagaagcctcatgtcgataaggagagagctggccaaaaggtaaagtatgctagctccatacagtgcaatagccacgtagtctcacagagaaagaggcaggcctgcatcatatccaaatatggccaagaattttattaaattaaaatgcaaacagcaaatgatagggacttagggtgatagaagtgcaaagcatgactgtcaaatttttggagcaggttttctgacttcggtcggaaaaccccttttgacccattacccatctaagttagatgcttttttaaatgttttttaatttttaaatttttaatttttttcattatttattttttatttttgagacggatctcggctcactgtaacctccacctcccgggttcaagcgattctcctgactcagcctcccgagtagctgggattacaggcgcgcgccaccatgcccggctaatttttctatttttagtaaagacggggtttcgccatgttgaccagggtggtcttgaactcctgacgtcaggtgatcctcctgcctcgtgctgggattgcaggcgtgagccaccgctcccggcccttagatgctttttaatcagcaagtacgcaatgctttcctgacaggaatgtcaagtccgtcaggaaatccacataagggtgttaagcaggcaaagtaccacatacagattaaaatcaaaagcactgtcaacgcttatttaatttatacagtagaccctaacttttctaattttgtg

SEQ ID NO: 811 - DNA, 1087 bp, synthetic construct
  source 1..1087: mol_type = other DNA
ggcatgtgattttgttttgtttaggtttttttttaactttatttgatcaacatgaaataatacaataagctatgtcttctaaccagcaggcagccagccaggagccatgtgtagcagtgttagaagctgcagcaggcatgtgggtaattgtggggagcttttaggaacagctagggagctgtgtggagctgcagagatgcagaggagcctggaggaacagaccagtgctgtgggctgggaggagcccccctcacaggtacttgctcaacggctccacgaccataagccttgaataagttacatggacattttacaaatggcacaggattgattatgtctgctgccagaagcctcatgtcgataaggagagagctggccaaaaggtaaagtatgctagctccatacagtgcaatagccacgtagtctcacagagaaagaggcaggcctgcatcatatccaaatatggccaagaattttattaaattaaaatgcaaacagcaaatgatagggacttagggtgatagaagtgcaaagcatgactgtcaaatttttggagcaggttttctgacttcggtcggaaaacccctgtttacttggttttaaaaatagcttgcactagcgataccgcgaatatggttattaggtttgttaggcacagtcgtgtcttactatagaaaaataacgtagtgttcattttgctgcctgtatgtgttaatttgtccttattgcgccattgttcttgttaagtcttctgtaaggagttgcgggtttcaaactgtcagtctgagagcataagctcacttttcagtcagttgaattgaatgttacattcgattggttctggatattgatattacccaaggcttgtcctgtttgtaagtcttttcctacacctgacaatatgattatgtttacaatgtccctagaactctgggtgtatcgttcccactgaataaaatttgatctctaagttgacctataaatttaagtaccaaaaaactggtttgtaagattttggaaggcagaggcagggaagagaccaacgtggtctacatataaagtaccaggtacatataaagtaccaggt

SEQ ID NO: 812 - DNA, 1083 bp, synthetic construct
  source 1..1083: mol_type = other DNA
ggcatgtgattttgttttgtttaggtttttttttaactttatttgatcaacatgaaataatacaataagctatgtcttctaaccagcaggcagccagccaggagccatgtgtagcagtgttagaagctgcagcaggcatgtgggtaattgtggggagcttttaggaacagctagggagctgtgtggagctgcagagatgcagaggagcctggaggaacagaccagtgctgtgggctgggaggagcccccctcacaggtacttgctcaacggctccacgaccataagccttgaataagttacatggacattttacaaatggcacaggattgattatgtctgctgccagaagcctcatgtcgataaggagagagctggccaaaaggtaaagtatgctagctccatacagtgcaatagccacgtagtctcacagagaaagaggcaggcctgcatcatatccaaatatggccaagaattttattaaattaaaatgcaaacagcaaatgatagggacttagggtgatagaagtgcaaagcatgactgtcaaatttttggagcaggttttctgacttcggtcggaaaacccctatttttgtggtgctaaaagttagattgcattccgcccttctcacgtctctttacgtgttgtttgcgaggcgtggcctcggaggtaaatggtctccttttacctcagataagcttacctttgctctgtgagtaagaatgtagctacacttccaaatttagctattgtcctttgcggtccaaatgaaaatattaccttccgatctaacaatgttaaactagtcccaggcccttctatcgattgccagaatagactagactactacacagacacaccctctcaaatcaggccagctcctgcaacctgcacctacagtttgtcccctgggacaaatgaaaggacaggccctctttcccccccccccccaaatcagagcacacacagatcttggggtctggggcagaaatttcgttcatggaaaaaacaaacaaacaaacaaacacgatcaaaggaagctcgttccctttggcctcagggtttcttagacgccgtgttccc

SEQ ID NO: 813 - DNA, 1084 bp, synthetic construct
  source 1..1084: mol_type = other DNA
ggcatgtgattttgttttgtttaggtttttttttaactttatttgatcaacatgaaataatacaataagctatgtcttctaaccagcaggcagccagccaggagccatgtgtagcagtgttagaagctgcagcaggcatgtgggtaattgtggggagcttttaggaacagctagggagctgtgtggagctgcagagatgcagaggagcctggaggaacagaccagtgctgtgggctgggaggagcccccctcacaggtacttgctcaacggctccacgaccataagccttgaataagttacatggacattttacaaatggcacaggattgattatgtctgctgccagaagcctcatgtcgataaggagagagctggccaaaaggtaaagtatgctagctccatacagtgcaatagccacgtagtctcacagagaaagaggcaggcctgcatcatatccaaatatggccaagaattttattaaattaaaatgcaaacagcaaatgatagggacttagggtgatagaagtgcaaagcatgactgtcaaatttttggagcaggttttctgacttcggtcggaaaacccctataactggtaaccaaaagcagattactttcccccttgtggtcttcgcgtttgcggacgggagagaactttcggccattttccttttagaaatttaacttcttgaaggccaccaggtgacccttacttccctctcacctttccttctacctgtactttctctattaaaaagcctgcagaagtacccttgacaaattgccaaaaatgacacctaaaaaaaaaaaaaggaaaaacgacaccttaggtaattataggttgtaagaaaaagatttgacctcttggagtttttatttcttaataccaaaggacacccaaggaacgtatctctcaaaattgggtttcaaacctcagccgtttccttcttagttccagtgcttaacacgcaacagacctgcacaccactacactgcatacgagttttaaagttaataaatcagtcacccctccatagtcttctacctacttgaagacagaaacggctgctaggaagcaattcttc

SEQ ID NO: 814 - DNA, 1087 bp, synthetic construct
  source 1..1087: mol_type = other DNA
ggcatgtgattttgttttgtttaggtttttttttaactttatttgatcaacatgaaataatacaataagctatgtcttctaaccagcaggcagccagccaggagccatgtgtagcagtgttagaagctgcagcaggcatgtgggtaattgtggggagcttttaggaacagctagggagctgtgtggagctgcagagatgcagaggagcctggaggaacagaccagtgctgtgggctgggaggagcccccctcacaggtacttgctcaacggctccacgaccataagccttgaataagttacatggacattttacaaatggcacaggattgattatgtctgctgccagaagcctcatgtcgataaggagagagctggccaaaaggtaaagtatgctagctccatacagtgcaatagccacgtagtctcacagagaaagaggcaggcctgcatcatatccaaatatggccaagaattttattaaattaaaatgcaaacagcaaatgatagggacttagggtgatagaagtgcaaagcatgactgtcaaatttttggagcaggttttctgacttcggtcggaaaacccctctggggaataagagtggtttaaagaaagaacaatttgagagatctgcttagatctaataaaacccaagtatagtttctttagacgtcttatatctcacgtaggacctcttatttcagactcactgcaagaacaagctaaagaactatatacagtcaggaacaaggtgagccatcgcggttctcagtcccatgatcttaagagtttttcctcttcccctcttccctggctgtcctggagctcactctgtagaccaggctggtctcaaactcagaaatccacttacctctgcctcccaagggctgggattaaaggcatgcaccaccattgcccggcagggtatgtggactatgctgtccttcaactcagagatcgtggtactttaaatctcattttccgaaagaaaagaaaagaaaggaaggggggaaataaagccagtatattttgcacccacaatctgaagttctacaaatattgttagaaaatgcaaaggacccaagtc

SEQ ID NO: 815 - DNA, 1087 bp, synthetic construct
  source 1..1087: mol_type = other DNA
ggcatgtgattttgttttgtttaggtttttttttaactttatttgatcaacatgaaataatacaataagctatgtcttctaaccagcaggcagccagccaggagccatgtgtagcagtgttagaagctgcagcaggcatgtgggtaattgtggggagcttttaggaacagctagggagctgtgtggagctgcagagatgcagaggagcctggaggaacagaccagtgctgtgggctgggaggagcccccctcacaggtacttgctcaacggctccacgaccataagccttgaataagttacatggacattttacaaatggcacaggattgattatgtctgctgccagaagcctcatgtcgataaggagagagctggccaaaaggtaaagtatgctagctccatacagtgcaatagccacgtagtctcacagagaaagaggcaggcctgcatcatatccaaatatggccaagaattttattaaattaaaatgcaaacagcaaatgatagggacttagggtgatagaagtgcaaagcatgactgtcaaatttttggagcaggttttctgacttcggtcggaaaacccctctcggtttatcttaaagggttttaaatatagaaagcttccttagtcttatgggtgagagtgctgtttaagccttacctaggtatgtctttgaacatttattacagattgttatttgtgactatgaccactcaggtgttctgttcttgtgaatttagacacactcagaaaggctacacactcaaagaccacaccaaagtgaagtactatctgggccgtgaaactggtcacatatcagttattttgcagtaaaacaaggaagtcaatcatactgcttcagtgggtcagggagtcaagaatgcacagtacaagagctggtgagattcctcagcaggtaagagcactgaatgctcttccaaagattctgagttcaaatcccagcaaccacgtggtggatttgaacaaaggatgaaaacaaccatccataaccagatctgatgccctcttctggagtgtcaaaagacagctatggtgtacttacataaataaataagtaaaaaca

SEQ ID NO: 816 - DNA, 1087 bp, synthetic construct
  source 1..1087: mol_type = other DNA
ggcatgtgattttgttttgtttaggtttttttttaactttatttgatcaacatgaaataatacaataagctatgtcttctaaccagcaggcagccagccaggagccatgtgtagcagtgttagaagctgcagcaggcatgtgggtaattgtggggagcttttaggaacagctagggagctgtgtggagctgcagagatgcagaggagcctggaggaacagaccagtgctgtgggctgggaggagcccccctcacaggtacttgctcaacggctccacgaccataagccttgaataagttacatggacattttacaaatggcacaggattgattatgtctgctgccagaagcctcatgtcgataaggagagagctggccaaaaggtaaagtatgctagctccatacagtgcaatagccacgtagtctcacagagaaagaggcaggcctgcatcatatccaaatatggccaagaattttattaaattaaaatgcaaacagcaaatgatagggacttagggtgatagaagtgcaaagcatgactgtcaaatttttggagcaggttttctgacttcggtcggaaaacccctccacattttgtgtttaaaaatagaaatatttaagtgagatcagtttaaatctgctttatctagggtgtctaactgcttgcatctttttaacttttccttatttgtgagaaggtctgtaaaacttattatatgttagtacactgtagctgtcttcagacactccagaagagggattcagatcaccttacagatggttttgagccaccatgtggttgctgggatttgaactcaggacctttagaaaagtagttgggtgctcttacccgctgagccatctcaccagccctttttttttcttttttccagttcgggtttctctgtgtgtagccctggctgtcctggaactcattctgtagaccgggctggcctcgaactcagaaatctgcctgcctctgcctcccaagtgctgggattaaaggaatgtgccttcattgcccggctctagggctttttgttgttgtttgtttgtttgtttgtttgtttgcttttgtggatggcct

SEQ ID NO: 817 - DNA, 1087 bp, synthetic construct
  source 1..1087: mol_type = other DNA
ggcatgtgattttgttttgtttaggtttttttttaactttatttgatcaacatgaaataatacaataagctatgtcttctaaccagcaggcagccagccaggagccatgtgtagcagtgttagaagctgcagcaggcatgtgggtaattgtggggagcttttaggaacagctagggagctgtgtggagctgcagagatgcagaggagcctggaggaacagaccagtgctgtgggctgggaggagcccccctcacaggtacttgctcaacggctccacgaccataagccttgaataagttacatggacattttacaaatggcacaggattgattatgtctgctgccagaagcctcatgtcgataaggagagagctggccaaaaggtaaagtatgctagctccatacagtgcaatagccacgtagtctcacagagaaagaggcaggcctgcatcatatccaaatatggccaagaattttattaaattaaaatgcaaacagcaaatgatagggacttagggtgatagaagtgcaaagcatgactgtcaaatttttggagcaggttttctgacttcggtcggaaaacccctaaaaccagtaagggagaaaggtcaagtaacatataaaggaaggcctatcagaattacaccagacttttcaccagagactatgaaagccagaagagcctggacagatgttatacagacactaagagaacacaaatgccagcccaggctactatacctggccaaactctcaattaccatagatggagaaaccaaagtattccacgacaaaaacaaattcacacaatatctttccacgaatccagcccttcaaaggataatgacagaaaagaagcaatacaaggacggaaatcacgccctagaacaaccaagaaactaatcattcaacaaaccaaaaagaagacagccacaagaacagaatgccaactctaacaacaaaaataaaaggaagcaacaattacttttccttaatatctcttaatatcaatggactcaattccccaataaaaagacatagactaacagactggctacacaaacaggacccaacattctgctgctta

SEQ ID NO: 818 - DNA, 1087 bp, synthetic construct
  source 1..1087: mol_type = other DNA
ggcatgtgattttgttttgtttaggtttttttttaactttatttgatcaacatgaaataatacaataagctatgtcttctaaccagcaggcagccagccaggagccatgtgtagcagtgttagaagctgcagcaggcatgtgggtaattgtggggagcttttaggaacagctagggagctgtgtggagctgcagagatgcagaggagcctggaggaacagaccagtgctgtgggctgggaggagcccccctcacaggtacttgctcaacggctccacgaccataagccttgaataagttacatggacattttacaaatggcacaggattgattatgtctgctgccagaagcctcatgtcgataaggagagagctggccaaaaggtaaagtatgctagctccatacagtgcaatagccacgtagtctcacagagaaagaggcaggcctgcatcatatccaaatatggccaagaattttattaaattaaaatgcaaacagcaaatgatagggacttagggtgatagaagtgcaaagcatgactgtcaaatttttggagcaggttttctgacttcggtcggaaaacccctcccaatttcactggtctacaatgaaagcaaaacagttctcttccccgctccccggtgtgtgagaggggctttgatccttctctggtttcctaggaaacgcgtatgtgctagagccacgctctgagacttccgcctcgtgcggtcccgcttcctttctgcctcctctggcctgcatccgtgggggaggtggctggctgcagggttctccggatctcttctgtgttcccactactcaagcaccgagtggcgttctatggcgtccgcctcggctcagcccgcggccctgagcgcggagcaggccaagggtgaggaaagagcctagtctgggtgtgggccgtcttctggggggagggcgcgatactattctttgcctctccaagtggggcccttgcccattagggcgaagggttgggaggacaagcttatcgggttgcttgcaggcctcggcccactaattccctgcctcttccctcctctgggctcgcccgccgtcctccgcg

SEQ ID NO: 819 - DNA, 1087 bp, synthetic construct
  source 1..1087: mol_type = other DNA
ggcatgtgattttgttttgtttaggtttttttttaactttatttgatcaacatgaaataatacaataagctatgtcttctaaccagcaggcagccagccaggagccatgtgtagcagtgttagaagctgcagcaggcatgtgggtaattgtggggagcttttaggaacagctagggagctgtgtggagctgcagagatgcagaggagcctggaggaacagaccagtgctgtgggctgggaggagcccccctcacaggtacttgctcaacggctccacgaccataagccttgaataagttacatggacattttacaaatggcacaggattgattatgtctgctgccagaagcctcatgtcgataaggagagagctggccaaaaggtaaagtatgctagctccatacagtgcaatagccacgtagtctcacagagaaagaggcaggcctgcatcatatccaaatatggccaagaattttattaaattaaaatgcaaacagcaaatgatagggacttagggtgatagaagtgcaaagcatgactgtcaaatttttggagcaggttttctgacttcggtcggaaaacccctgaatttgttaaattacaggaggaagcttttttagttcattttacaaatactttcttgttaggtagataataccttctaaggttattatctggatcttctaagtctttttatcgctagcaagtctaagtttctggactttggaattagaagttaatgtcgtaggcgggcatggtggtccacgcctttaatcccagagtttgggaggcagacgcaggtggttttctgagttcgaggccatcctgctcttcaatgttagttccaggacagccagggttatacaaagaaaccctgtctcgagaaacaaaacaaacaaaaaaagagtagctgagtgctctgagttgtctctccagccccttagctatttattttcatttaaattatttttgttttattcgcttgtgtgcctgagtttgaatttcccgggattaacagttgaagactagggctggtgagatggctcagcggttaagattgccgactgctcttccaaaggtcctgag

SEQ ID NO: 820 - DNA, 1087 bp, synthetic construct
  source 1..1087: mol_type = other DNA
ggcatgtgattttgttttgtttaggtttttttttaactttatttgatcaacatgaaataatacaataagctatgtcttctaaccagcaggcagccagccaggagccatgtgtagcagtgttagaagctgcagcaggcatgtgggtaattgtggggagcttttaggaacagctagggagctgtgtggagctgcagagatgcagaggagcctggaggaacagaccagtgctgtgggctgggaggagcccccctcacaggtacttgctcaacggctccacgaccataagccttgaataagttacatggacattttacaaatggcacaggattgattatgtctgctgccagaagcctcatgtcgataaggagagagctggccaaaaggtaaagtatgctagctccatacagtgcaatagccacgtagtctcacagagaaagaggcaggcctgcatcatatccaaatatggccaagaattttattaaattaaaatgcaaacagcaaatgatagggacttagggtgatagaagtgcaaagcatgactgtcaaatttttggagcaggttttctgacttcggtcggaaaacccctaccccctaattctacaagaatagaaagcttagcagctcctctgaatggttgctctcaggtgctagtggttgcaagtcgtatgttgatgcctgcctttgccctacctggtgtgtgagcgtgagcgcgccccacctctccagcctctctcttactgtttttcagacaagatgggactgttgttctcctactgctatgtacctcaatttcaattgatcatgcctggacataactgcccatgttgtaaggtcgtctacgttgtaaggtcgtgctcagtttctgatgcctagactagtcacctttccgtttgcctcctgactgtgtaaatgaggcaaatgaaggtggtctcttaactgacatgttagtgtttgacctatgggatagtttctcattgttgagacagaatttctagaagctggtccgctgagcggctaagagcacttgctgatattgcaaaggatctacctgggtttggttctcagcactcacatggaagttcacat

SEQ ID NO: 821 - DNA, 654 bp, synthetic construct
  source 1..654: mol_type = other DNA
ggcatgtgattttgttttgtttaggtttttttttaactttatttgatcaacatgaaataatacaataagctatgtcttctaaccagcaggcagccagccaggagccatgtgtagcagtgttagaagctgcagcaggcatgtgggtaattgtggggagcttttaggaacagctagggagctgtgtggagctgcagagatgcagaggagcctggaggaacagaccagtgctgtgggctgggaggagcccccctcacaggtacttgctcaacggctccacgaccataagccttgaataagttacatggacattttacaaatggcacaggattgattatgtctgctgccagaagcctcatgtcgataaggagagagctggccaaaaggtaaagtatgctagctccatacagtgcaatagccacgtagtctcacagagaaagaggcaggcctgcatcatatccaaatatggccaagaattttattaaattaaaatgcaaacagcaaatgatagggacttagggtgatagaagtgcaaagcatgactgtcaaatttttggagcaggttttctgacttcggtcggaaaaccccttgtagttcctgcaatttaattttcgtttaaaactttattttattctttaacttaaaaaaaatatata

SEQ ID NO: 822 - DNA, 1087 bp, synthetic construct
  source 1..1087: mol_type = other DNA
tatttttaatgaagcagggccatggagcccaagctggccttgaacttctcagcttttgtgctggtatcacagaaatgtggcgctatgcccggtcgggcctgatgttccagagtctttgcagtgtggggaacttgtaaggatgagactacaagacatcgggccacatcgcctgccactacttaagtccgattcacttcggctttagctccaagcctttaatctcgcgaagctctttttttttttttaacaacataggagctgtgattggctgttttcagccaatcagcactgactcatttgcatagcctttacaagcggtcacaaactcaagaaacgagcggttttaatagtcttttagaatattgtttatcgaaccgaataaggaactgtgctttgtgattcacatatcagtggaggggtgtggaaatggcaccttgatctcaccctcatcgaaagtggagttgatgtccttccctggctcgctacagacgcacttccgcaatgatagggacttagggtgatagaagtgcaaagcatgactgtcaaatttttggagcaggttttctgacttcggtcggaaaacccctactttctggagtttcaaaaacagactgtacgccaagggtcatatctttttttgtattggtttgtgtcttggttggtgtcttaggtgttaatcctacagtggagggtttatgggaataggaagtaacatgtcgcctgcatgtcataggagaaaaagcgagcatcagccgtatcggctttgtaacacaaattagctatcgtgaagtccgctcagctcttccctttctaccctggctgctttttgcagggattggtccgtggtctccagtctcttgggttctcaccctgtgtgaaaatcttcgtgtttttccctaccccccagtcacctcttacacagcctctgcttccaagcgcagcccccacaggagtttgtaggatttctgtgctagcggggaatgtgttctcacctcatagagccaggtagaaattatgcagatgggcagttctctgggaagaaagcagggcctttggggctctcagtgtccccgttgggttgtagaca

SEQ ID NO: 823 - DNA, 1087 bp, synthetic construct
  source 1..1087: mol_type = other DNA
tatttttaatgaagcagggccatggagcccaagctggccttgaacttctcagcttttgtgctggtatcacagaaatgtggcgctatgcccggtcgggcctgatgttccagagtctttgcagtgtggggaacttgtaaggatgagactacaagacatcgggccacatcgcctgccactacttaagtccgattcacttcggctttagctccaagcctttaatctcgcgaagctctttttttttttttaacaacataggagctgtgattggctgttttcagccaatcagcactgactcatttgcatagcctttacaagcggtcacaaactcaagaaacgagcggttttaatagtcttttagaatattgtttatcgaaccgaataaggaactgtgctttgtgattcacatatcagtggaggggtgtggaaatggcaccttgatctcaccctcatcgaaagtggagttgatgtccttccctggctcgctacagacgcacttccgcaatgatagggacttagggtgatagaagtgcaaagcatgactgtcaaatttttggagcaggttttctgacttcggtcggaaaacccctactttctggagtttctaaaagtagactgtacgctaagggtcatatctttttttgttttggtttgtgtcttggttggcgtcttaaatgttaatcctacagtggagggctggcgaataggaagtaacatgtcgcctgcacgccataggagaaaaagcgagcatcagccgtatcggctttgtaacacaaattagctatcgtgaagtccgctcagctcttccctttctaccctggctgctttttgcagggattggtccgtggtctccagtctcttgggttctcaccctgtgtgaaaatcttcctgtttttccctaccccccaagtcacctcttacacagcctctgcttccaagcgcagcccccacaggagtttgtaggatttctgtgctagcggggagtgtgttctcacctcatagagccaggtagaaactacgcagatgggtgctgttctccaggaagaaagcagggcctttggggctctcagtgtccccgttgggttgtaga

SEQ ID NO: 824 - DNA, 1087 bp, synthetic construct
  source 1..1087: mol_type = other DNA
tatttttaatgaagcagggccatggagcccaagctggccttgaacttctcagcttttgtgctggtatcacagaaatgtggcgctatgcccggtcgggcctgatgttccagagtctttgcagtgtggggaacttgtaaggatgagactacaagacatcgggccacatcgcctgccactacttaagtccgattcacttcggctttagctccaagcctttaatctcgcgaagctctttttttttttttaacaacataggagctgtgattggctgttttcagccaatcagcactgactcatttgcatagcctttacaagcggtcacaaactcaagaaacgagcggttttaatagtcttttagaatattgtttatcgaaccgaataaggaactgtgctttgtgattcacatatcagtggaggggtgtggaaatggcaccttgatctcaccctcatcgaaagtggagttgatgtccttccctggctcgctacagacgcacttccgcaatgatagggacttagggtgatagaagtgcaaagcatgactgtcaaatttttggagcaggttttctgacttcggtcggaaaacccctactttctggagtttcaaaaacagaccgtacgccaagggtcatgtcttttttcgtattggtttgtgtcttagttgttaatcctacagtggaggcctggggaataagaagtaacatgtggcctgcacgccataggagaaaaagcgagcatcagccgtatcggctttgtaacacaaattagctatcgtgaagtccgctcagctcttccatttctaccctggctgctttttgcagggattggtccgtggtctccagtctcttgggttctcaccctgtgtgaaaatcttcgtgtttttccctaccccccaagtcacctcttacacagcctctgcttccaagcgcagcccccacaggagtttgtaggatttctgtgctagcggggagtgtgttctcacctcatagagccaggtagaaattatgcagatgggcgctgttctctgggaagaaagcagggcctttggggctctcagtgtccccgttgggttgtagacataacactctta

SEQ ID NO: 825 - DNA, 891 bp, synthetic construct
  source 1..891: mol_type = other DNA
tatttttaatgaagcagggccatggagcccaagctggccttgaacttctcagcttttgtgctggtatcacagaaatgtggcgctatgcccggtcgggcctgatgttccagagtctttgcagtgtggggaacttgtaaggatgagactacaagacatcgggccacatcgcctgccactacttaagtccgattcacttcggctttagctccaagcctttaatctcgcgaagctctttttttttttttaacaacataggagctgtgattggctgttttcagccaatcagcactgactcatttgcatagcctttacaagcggtcacaaactcaagaaacgagcggttttaatagtcttttagaatattgtttatcgaaccgaataaggaactgtgctttgtgattcacatatcagtggaggggtgtggaaatggcaccttgatctcaccctcatcgaaagtggagttgatgtccttccctggctcgctacagacgcacttccgcaatgatagggacttagggtgatagaagtgcaaagcatgactgtcaaatttttggagcaggttttctgacttcggtcggaaaacccctcctccggggatacaacgtgtttcctaaaagtagagggaggtaagagacggtagcacctgcggggcggcttgcacgccgagtgcctgtgacgcgccggcttaacttaactgcttccctgaagtaccttgaggttcctgatgtgcgggcggtagacggtaggcttatgcggcacgctgtcgtttccaccgtggctactgcgctttgggaaggccacgacctcctcctttggggaggtccttaggatctcagcttggcagtcgagtgggtggcgaccttttaaaggaatgggacccacccggagttc

SEQ ID NO: 826 - DNA, 1079 bp, synthetic construct
  source 1..1079: mol_type = other DNA
tatttttaatgaagcagggccatggagcccaagctggccttgaacttctcagcttttgtgctggtatcacagaaatgtggcgctatgcccggtcgggcctgatgttccagagtctttgcagtgtggggaacttgtaaggatgagactacaagacatcgggccacatcgcctgccactacttaagtccgattcacttcggctttagctccaagcctttaatctcgcgaagctctttttttttttttaacaacataggagctgtgattggctgttttcagccaatcagcactgactcatttgcatagcctttacaagcggtcacaaactcaagaaacgagcggttttaatagtcttttagaatattgtttatcgaaccgaataaggaactgtgctttgtgattcacatatcagtggaggggtgtggaaatggcaccttgatctcaccctcatcgaaagtggagttgatgtccttccctggctcgctacagacgcacttccgcaatgatagggacttagggtgatagaagtgcaaagcatgactgtcaaatttttggagcaggttttctgacttcggtcggaaaacccctttcccttcttgtaatacaaaataataacaaccacagaggacatcgcaagtaaaatgtgtataacaaccccatctaaagaaccctatcatctttctactatctgtctacctaaatatgtatagtataaataaccctatatagcactctaagcaacttaagttaggtaacttagaaaactcttttttttttttgagactgagtctcactctgtcgcacccaggctggagtgcagtggcgtgatctcggctcactgcaacctccaccttctgggttcaagtgattctcccatctcagtctcccaagtagctgggattacaggcacgccaccatgccctgctacatttttttttttttagtagagatgaggtttcaccacattggccaggctgttctcgaactcctgacctcaggtgatccgcccaccttggcctcatgaagtgctgggattacaggtgtgagccactgtacccagccagaaaactcttaaaaaac

SEQ ID NO: 827 - DNA, 969 bp, synthetic construct
  source 1..969: mol_type = other DNA
tatttttaatgaagcagggccatggagcccaagctggccttgaacttctcagcttttgtgctggtatcacagaaatgtggcgctatgcccggtcgggcctgatgttccagagtctttgcagtgtggggaacttgtaaggatgagactacaagacatcgggccacatcgcctgccactacttaagtccgattcacttcggctttagctccaagcctttaatctcgcgaagctctttttttttttttaacaacataggagctgtgattggctgttttcagccaatcagcactgactcatttgcatagcctttacaagcggtcacaaactcaagaaacgagcggttttaatagtcttttagaatattgtttatcgaaccgaataaggaactgtgctttgtgattcacatatcagtggaggggtgtggaaatggcaccttgatctcaccctcatcgaaagtggagttgatgtccttccctggctcgctacagacgcacttccgcaatgatagggacttagggtgatagaagtgcaaagcatgactgtcaaatttttggagcaggttttctgacttcggtcggaaaacccctctgaattttcttgcagttgaacaacagaggctttttttgtgtgtgtgggggtgcttggttttgggaggttgaagagtacttgttcgcaaactctctaaatgagagatggggaagtgtcttaccagctgattcgcgagagcacctgcaagtttacctgttttagtgatttgcgtttatgaaagttggagttgctgattttgtgatctctacttttaaggtaaaagcagggcggtgttgacttttcttgccagttggctgtcctgttttctttctcgcactgttttctttttgagacgaagtctgtcgctcaggctggagtgcactggcgtgatctcggctcgctgcaaactttgccgaacccctgtttagcgatttccgtttg

SEQ ID NO: 828 - DNA, 1087 bp, synthetic construct
  source 1..1087: mol_type = other DNA
tatttttaatgaagcagggccatggagcccaagctggccttgaacttctcagcttttgtgctggtatcacagaaatgtggcgctatgcccggtcgggcctgatgttccagagtctttgcagtgtggggaacttgtaaggatgagactacaagacatcgggccacatcgcctgccactacttaagtccgattcacttcggctttagctccaagcctttaatctcgcgaagctctttttttttttttaacaacataggagctgtgattggctgttttcagccaatcagcactgactcatttgcatagcctttacaagcggtcacaaactcaagaaacgagcggttttaatagtcttttagaatattgtttatcgaaccgaataaggaactgtgctttgtgattcacatatcagtggaggggtgtggaaatggcaccttgatctcaccctcatcgaaagtggagttgatgtccttccctggctcgctacagacgcacttccgcaatgatagggacttagggtgatagaagtgcaaagcatgactgtcaaatttttggagcaggttttctgacttcggtcggaaaacccctatatgtggtaatccaacaatagaaattatttttaagtttgtgtgttcctttttctgttcaatggtgcttttgatattgttgtaaagcagtgactagcagattctgtgtggtaaaagcactgaaccctgtttagttcttttctccctaccttattggtaattatttctgtgtatatatgttccaaagaaatgcggcttgtatattcatgcttttcaactttttgtgatagacagttgatacacaagtagtacctcctccgggatcttcttagtcaagactgtttggtagatgcatgttttttgttacttgtaatgtacagtattcagttcattttctttttgcagcactgtccggttgaaacacaacgcgaggatcgggcgtggtggctcacgcctgtaatcccagcactttgggaggccgaggcaggacaatcaagaccaatcctggtcatcaaggcaggagaatcaagaccatcgaggtcaggagatcaagaccatcct

SEQ ID NO: 829 - DNA, 1085 bp, synthetic construct
  source 1..1085: mol_type = other DNA
tatttttaatgaagcagggccatggagcccaagctggccttgaacttctcagcttttgtgctggtatcacagaaatgtggcgctatgcccggtcgggcctgatgttccagagtctttgcagtgtggggaacttgtaaggatgagactacaagacatcgggccacatcgcctgccactacttaagtccgattcacttcggctttagctccaagcctttaatctcgcgaagctctttttttttttttaacaacataggagctgtgattggctgttttcagccaatcagcactgactcatttgcatagcctttacaagcggtcacaaactcaagaaacgagcggttttaatagtcttttagaatattgtttatcgaaccgaataaggaactgtgctttgtgattcacatatcagtggaggggtgtggaaatggcaccttgatctcaccctcatcgaaagtggagttgatgtccttccctggctcgctacagacgcacttccgcaatgatagggacttagggtgatagaagtgcaaagcatgactgtcaaatttttggagcaggttttctgacttcggtcggaaaacccctacatcaggttgtttttctgtttttacatcaggttgtttttctgtttggttttttttttacaccacgtttatacgccggtgcacggtttaccactgaaaacacctttcatctacaggtgatatcttttaacacaaataaaatgtagtagtcctaggagacggaatagaaggaggtggggcctaggcagattcatctctgcggtgcattttgcctctggccctcgggccctagtttgcgatctttcccatcttgcctctgcttccctctgcacaatcctgagtattgcagtaccttacacttaaggaaatttcgtcttgccaaagttgatccatttcagctccgaaacataacaggaactagtgcaacgataaacgtatgaggaacttgcaataagagtgacagaatcctttgaatcaaaaaaaaaaaaagccaccacttaatgagtatctaccatatgtcaagggcttcaccaatatttcattgaaatattccagacca

SEQ ID NO: 830 - DNA, 1087 bp, synthetic construct
  source 1..1087: mol_type = other DNA
tatttttaatgaagcagggccatggagcccaagctggccttgaacttctcagcttttgtgctggtatcacagaaatgtggcgctatgcccggtcgggcctgatgttccagagtctttgcagtgtggggaacttgtaaggatgagactacaagacatcgggccacatcgcctgccactacttaagtccgattcacttcggctttagctccaagcctttaatctcgcgaagctctttttttttttttaacaacataggagctgtgattggctgttttcagccaatcagcactgactcatttgcatagcctttacaagcggtcacaaactcaagaaacgagcggttttaatagtcttttagaatattgtttatcgaaccgaataaggaactgtgctttgtgattcacatatcagtggaggggtgtggaaatggcaccttgatctcaccctcatcgaaagtggagttgatgtccttccctggctcgctacagacgcacttccgcaatgatagggacttagggtgatagaagtgcaaagcatgactgtcaaatttttggagcaggttttctgacttcggtcggaaaacccctcttatgatgtttgttgccaatgatagattgttttcactgtgcaaaaattatgggtagttttggtggtcttgatgcagttgtaagcttggggtatgaaggtttgggccacgcctgggcgcttccggctgcgccggatgctgtttcctttccgctcccaggggcgttgggaacggttgtaggacgtggctctttattcgtgagttttccatttacctccgctgaacctagagcttcagacgccctatggcgtccgcctcgacccaaccggcggccttgagcgctgagcaagcaaagggtgagaatcgtcctagtcaaggcataggctgctggcctggggtagtcaaggcatgggctgctggtctggggaggatgcgggcggaggatgtggggcgacaaacctggctacgtccgccgggaaaatggggtaggggacgccgggtaccgtccttctaagtggggcgcttgcccccaagacttgggatcttattgggttacctaca

SEQ ID NO: 831 - DNA, 1085 bp, synthetic construct
  source 1..1085: mol_type = other DNA
tatttttaatgaagcagggccatggagcccaagctggccttgaacttctcagcttttgtgctggtatcacagaaatgtggcgctatgcccggtcgggcctgatgttccagagtctttgcagtgtggggaacttgtaaggatgagactacaagacatcgggccacatcgcctgccactacttaagtccgattcacttcggctttagctccaagcctttaatctcgcgaagctctttttttttttttaacaacataggagctgtgattggctgttttcagccaatcagcactgactcatttgcatagcctttacaagcggtcacaaactcaagaaacgagcggttttaatagtcttttagaatattgtttatcgaaccgaataaggaactgtgctttgtgattcacatatcagtggaggggtgtggaaatggcaccttgatctcaccctcatcgaaagtggagttgatgtccttccctggctcgctacagacgcacttccgcaatgatagggacttagggtgatagaagtgcaaagcatgactgtcaaatttttggagcaggttttctgacttcggtcggaaaaccccttctttactgttatatgttaggcgaaatattacgcgtttggagtaagtggtgctttttgtaactgaaaagagattctgtgtgtgtttttttttttttagaggctgcatagttatttgtatgaaccgcaggtgacctaattagcaaggtaattcagacctgtatcctagcacttaagaagtggaagtgggataaccctgcgtgttctcgtgtgggaggctagcttaagcaacaaagcaggaaggccccaccaacaaaagaatttaaaaattatacgtgcgtggtggcgcgcgtatgaggaaattatttggcaactgtgttacagtatagcagcaaatggaatagacctagtccctgactttaggagacctgcctcagccccccgaatggctgggactacaggcgtgcgcctccgcgcccagctaatttttgcatttttggtagagacgggttcaccatgttggccaggatggtctccatctcttcatctggtgatccgcc

SEQ ID NO: 832 - DNA, 1087 bp, synthetic construct
  source 1..1087: mol_type = other DNA
tatttttaatgaagcagggccatggagcccaagctggccttgaacttctcagcttttgtgctggtatcacagaaatgtggcgctatgcccggtcgggcctgatgttccagagtctttgcagtgtggggaacttgtaaggatgagactacaagacatcgggccacatcgcctgccactacttaagtccgattcacttcggctttagctccaagcctttaatctcgcgaagctctttttttttttttaacaacataggagctgtgattggctgttttcagccaatcagcactgactcatttgcatagcctttacaagcggtcacaaactcaagaaacgagcggttttaatagtcttttagaatattgtttatcgaaccgaataaggaactgtgctttgtgattcacatatcagtggaggggtgtggaaatggcaccttgatctcaccctcatcgaaagtggagttgatgtccttccctggctcgctacagacgcacttccgcaatgatagggacttagggtgatagaagtgcaaagcatgactgtcaaatttttggagcaggttttctgacttcggtcggaaaacccctaccttattcacgcctaaaaagtagactgactgtggggtggtcgtgttttttgtttcttgttggtaggtggtgaatgcgtttttttcgttgttttctccgttactcaggctgccagttgcttggcagtcttgtcgctggctgtggacgctctgcacttcatcaccgtccccagctgcgctttgagccggtctaaggttgcccacagtattgacgttgggacccacgaaactggcaatttccatgtgtgcggccttacccagttctcccaaacttctgcgtataaccgcttctctgtgcttcagaaagataagtccggccccggcctcacacagcagctcagttcgtgacagcgtttaatatgtaaaatggagcaaataatttatagggcgttgggagagttaaagagactaattcatttacgtgttaaatacagggaatggcttttgcattgatataaccccagcctccagcatgcgccagacctgacgtaggtgttcggc

SEQ ID NO: 833 - DNA, 1087 bp, synthetic construct
  source 1..1087: mol_type = other DNA
tatttttaatgaagcagggccatggagcccaagctggccttgaacttctcagcttttgtgctggtatcacagaaatgtggcgctatgcccggtcgggcctgatgttccagagtctttgcagtgtggggaacttgtaaggatgagactacaagacatcgggccacatcgcctgccactacttaagtccgattcacttcggctttagctccaagcctttaatctcgcgaagctctttttttttttttaacaacataggagctgtgattggctgttttcagccaatcagcactgactcatttgcatagcctttacaagcggtcacaaactcaagaaacgagcggttttaatagtcttttagaatattgtttatcgaaccgaataaggaactgtgctttgtgattcacatatcagtggaggggtgtggaaatggcaccttgatctcaccctcatcgaaagtggagttgatgtccttccctggctcgctacagacgcacttccgcaatgatagggacttagggtgatagaagtgcaaagcatgactgtcaaatttttggagcaggttttctgacttcggtcggaaaaccccttttgacccattacccatctaagttagatgcttttttaaatgttttttaatttttaaatttttaatttttttcattatttattttttatttttgagacggatctcggctcactgtaacctccacctcccgggttcaagcgattctcctgactcagcctcccgagtagctgggattacaggcgcgcgccaccatgcccggctaatttttctatttttagtaaagacggggtttcgccatgttgaccagggtggtcttgaactcctgacgtcaggtgatcctcctgcctcgtgctgggattgcaggcgtgagccaccgctcccggcccttagatgctttttaatcagcaagtacgcaatgctttcctgacaggaatgtcaagtccgtcaggaaatccacataagggtgttaagcaggcaaagtaccacatacagattaaaatcaaaagcactgtcaacgcttatttaatttatacagtagaccctaacttttctaattttgtg

SEQ ID NO: 834 - DNA, 1087 bp, synthetic construct
  source 1..1087: mol_type = other DNA
tatttttaatgaagcagggccatggagcccaagctggccttgaacttctcagcttttgtgctggtatcacagaaatgtggcgctatgcccggtcgggcctgatgttccagagtctttgcagtgtggggaacttgtaaggatgagactacaagacatcgggccacatcgcctgccactacttaagtccgattcacttcggctttagctccaagcctttaatctcgcgaagctctttttttttttttaacaacataggagctgtgattggctgttttcagccaatcagcactgactcatttgcatagcctttacaagcggtcacaaactcaagaaacgagcggttttaatagtcttttagaatattgtttatcgaaccgaataaggaactgtgctttgtgattcacatatcagtggaggggtgtggaaatggcaccttgatctcaccctcatcgaaagtggagttgatgtccttccctggctcgctacagacgcacttccgcaatgatagggacttagggtgatagaagtgcaaagcatgactgtcaaatttttggagcaggttttctgacttcggtcggaaaacccctgtttacttggttttaaaaatagcttgcactagcgataccgcgaatatggttattaggtttgttaggcacagtcgtgtcttactatagaaaaataacgtagtgttcattttgctgcctgtatgtgttaatttgtccttattgcgccattgttcttgttaagtcttctgtaaggagttgcgggtttcaaactgtcagtctgagagcataagctcacttttcagtcagttgaattgaatgttacattcgattggttctggatattgatattacccaaggcttgtcctgtttgtaagtcttttcctacacctgacaatatgattatgtttacaatgtccctagaactctgggtgtatcgttcccactgaataaaatttgatctctaagttgacctataaatttaagtaccaaaaaactggtttgtaagattttggaaggcagaggcagggaagagaccaacgtggtctacatataaagtaccaggtacatataaagtaccaggt

SEQ ID NO: 835 - DNA, 1083 bp, synthetic construct
  source 1..1083: mol_type = other DNA
tatttttaatgaagcagggccatggagcccaagctggccttgaacttctcagcttttgtgctggtatcacagaaatgtggcgctatgcccggtcgggcctgatgttccagagtctttgcagtgtggggaacttgtaaggatgagactacaagacatcgggccacatcgcctgccactacttaagtccgattcacttcggctttagctccaagcctttaatctcgcgaagctctttttttttttttaacaacataggagctgtgattggctgttttcagccaatcagcactgactcatttgcatagcctttacaagcggtcacaaactcaagaaacgagcggttttaatagtcttttagaatattgtttatcgaaccgaataaggaactgtgctttgtgattcacatatcagtggaggggtgtggaaatggcaccttgatctcaccctcatcgaaagtggagttgatgtccttccctggctcgctacagacgcacttccgcaatgatagggacttagggtgatagaagtgcaaagcatgactgtcaaatttttggagcaggttttctgacttcggtcggaaaacccctatttttgtggtgctaaaagttagattgcattccgcccttctcacgtctctttacgtgttgtttgcgaggcgtggcctcggaggtaaatggtctccttttacctcagataagcttacctttgctctgtgagtaagaatgtagctacacttccaaatttagctattgtcctttgcggtccaaatgaaaatattaccttccgatctaacaatgttaaactagtcccaggcccttctatcgattgccagaatagactagactactacacagacacaccctctcaaatcaggccagctcctgcaacctgcacctacagtttgtcccctgggacaaatgaaaggacaggccctctttcccccccccccccaaatcagagcacacacagatcttggggtctggggcagaaatttcgttcatggaaaaaacaaacaaacaaacaaacacgatcaaaggaagctcgttccctttggcctcagggtttcttagacgccgtgttccc

SEQ ID NO: 836 - DNA, 1084 bp, synthetic construct
  source 1..1084: mol_type = other DNA
tatttttaatgaagcagggccatggagcccaagctggccttgaacttctcagcttttgtgctggtatcacagaaatgtggcgctatgcccggtcgggcctgatgttccagagtctttgcagtgtggggaacttgtaaggatgagactacaagacatcgggccacatcgcctgccactacttaagtccgattcacttcggctttagctccaagcctttaatctcgcgaagctctttttttttttttaacaacataggagctgtgattggctgttttcagccaatcagcactgactcatttgcatagcctttacaagcggtcacaaactcaagaaacgagcggttttaatagtcttttagaatattgtttatcgaaccgaataaggaactgtgctttgtgattcacatatcagtggaggggtgtggaaatggcaccttgatctcaccctcatcgaaagtggagttgatgtccttccctggctcgctacagacgcacttccgcaatgatagggacttagggtgatagaagtgcaaagcatgactgtcaaatttttggagcaggttttctgacttcggtcggaaaacccctataactggtaaccaaaagcagattactttcccccttgtggtcttcgcgtttgcggacgggagagaactttcggccattttccttttagaaatttaacttcttgaaggccaccaggtgacccttacttccctctcacctttccttctacctgtactttctctattaaaaagcctgcagaagtacccttgacaaattgccaaaaatgacacctaaaaaaaaaaaaaggaaaaacgacaccttaggtaattataggttgtaagaaaaagatttgacctcttggagtttttatttcttaataccaaaggacacccaaggaacgtatctctcaaaattgggtttcaaacctcagccgtttccttcttagttccagtgcttaacacgcaacagacctgcacaccactacactgcatacgagttttaaagttaataaatcagtcacccctccatagtcttctacctacttgaagacagaaacggctgctaggaagcaattcttc

SEQ ID NO: 837 - DNA, 1087 bp, synthetic construct
  source 1..1087: mol_type = other DNA
tatttttaatgaagcagggccatggagcccaagctggccttgaacttctcagcttttgtgctggtatcacagaaatgtggcgctatgcccggtcgggcctgatgttccagagtctttgcagtgtggggaacttgtaaggatgagactacaagacatcgggccacatcgcctgccactacttaagtccgattcacttcggctttagctccaagcctttaatctcgcgaagctctttttttttttttaacaacataggagctgtgattggctgttttcagccaatcagcactgactcatttgcatagcctttacaagcggtcacaaactcaagaaacgagcggttttaatagtcttttagaatattgtttatcgaaccgaataaggaactgtgctttgtgattcacatatcagtggaggggtgtggaaatggcaccttgatctcaccctcatcgaaagtggagttgatgtccttccctggctcgctacagacgcacttccgcaatgatagggacttagggtgatagaagtgcaaagcatgactgtcaaatttttggagcaggttttctgacttcggtcggaaaacccctctggggaataagagtggtttaaagaaagaacaatttgagagatctgcttagatctaataaaacccaagtatagtttctttagacgtcttatatctcacgtaggacctcttatttcagactcactgcaagaacaagctaaagaactatatacagtcaggaacaaggtgagccatcgcggttctcagtcccatgatcttaagagtttttcctcttcccctcttccctggctgtcctggagctcactctgtagaccaggctggtctcaaactcagaaatccacttacctctgcctcccaagggctgggattaaaggcatgcaccaccattgcccggcagggtatgtggactatgctgtccttcaactcagagatcgtggtactttaaatctcattttccgaaagaaaagaaaagaaaggaaggggggaaataaagccagtatattttgcacccacaatctgaagttctacaaatattgttagaaaatgcaaaggacccaagtc

SEQ ID NO: 838 - DNA, 1087 bp, synthetic construct
  source 1..1087: mol_type = other DNA
tatttttaatgaagcagggccatggagcccaagctggccttgaacttctcagcttttgtgctggtatcacagaaatgtggcgctatgcccggtcgggcctgatgttccagagtctttgcagtgtggggaacttgtaaggatgagactacaagacatcgggccacatcgcctgccactacttaagtccgattcacttcggctttagctccaagcctttaatctcgcgaagctctttttttttttttaacaacataggagctgtgattggctgttttcagccaatcagcactgactcatttgcatagcctttacaagcggtcacaaactcaagaaacgagcggttttaatagtcttttagaatattgtttatcgaaccgaataaggaactgtgctttgtgattcacatatcagtggaggggtgtggaaatggcaccttgatctcaccctcatcgaaagtggagttgatgtccttccctggctcgctacagacgcacttccgcaatgatagggacttagggtgatagaagtgcaaagcatgactgtcaaatttttggagcaggttttctgacttcggtcggaaaacccctctcggtttatcttaaagggttttaaatatagaaagcttccttagtcttatgggtgagagtgctgtttaagccttacctaggtatgtctttgaacatttattacagattgttatttgtgactatgaccactcaggtgttctgttcttgtgaatttagacacactcagaaaggctacacactcaaagaccacaccaaagtgaagtactatctgggccgtgaaactggtcacatatcagttattttgcagtaaaacaaggaagtcaatcatactgcttcagtgggtcagggagtcaagaatgcacagtacaagagctggtgagattcctcagcaggtaagagcactgaatgctcttccaaagattctgagttcaaatcccagcaaccacgtggtggatttgaacaaaggatgaaaacaaccatccataaccagatctgatgccctcttctggagtgtcaaaagacagctatggtgtacttacataaataaataagtaaaaaca

SEQ ID NO: 839 - DNA, 1087 bp, synthetic construct
  source 1..1087: mol_type = other DNA
tatttttaatgaagcagggccatggagcccaagctggccttgaacttctcagcttttgtgctggtatcacagaaatgtggcgctatgcccggtcgggcctgatgttccagagtctttgcagtgtggggaacttgtaaggatgagactacaagacatcgggccacatcgcctgccactacttaagtccgattcacttcggctttagctccaagcctttaatctcgcgaagctctttttttttttttaacaacataggagctgtgattggctgttttcagccaatcagcactgactcatttgcatagcctttacaagcggtcacaaactcaagaaacgagcggttttaatagtcttttagaatattgtttatcgaaccgaataaggaactgtgctttgtgattcacatatcagtggaggggtgtggaaatggcaccttgatctcaccctcatcgaaagtggagttgatgtccttccctggctcgctacagacgcacttccgcaatgatagggacttagggtgatagaagtgcaaagcatgactgtcaaatttttggagcaggttttctgacttcggtcggaaaacccctccacattttgtgtttaaaaatagaaatatttaagtgagatcagtttaaatctgctttatctagggtgtctaactgcttgcatctttttaacttttccttatttgtgagaaggtctgtaaaacttattatatgttagtacactgtagctgtcttcagacactccagaagagggattcagatcaccttacagatggttttgagccaccatgtggttgctgggatttgaactcaggacctttagaaaagtagttgggtgctcttacccgctgagccatctcaccagccctttttttttcttttttccagttcgggtttctctgtgtgtagccctggctgtcctggaactcattctgtagaccgggctggcctcgaactcagaaatctgcctgcctctgcctcccaagtgctgggattaaaggaatgtgccttcattgcccggctctagggctttttgttgttgtttgtttgtttgtttgtttgtttgcttttgtggatggcct

SEQ ID NO: 840 - DNA, 1087 bp, synthetic construct
  source 1..1087: mol_type = other DNA
tatttttaatgaagcagggccatggagcccaagctggccttgaacttctcagcttttgtgctggtatcacagaaatgtggcgctatgcccggtcgggcctgatgttccagagtctttgcagtgtggggaacttgtaaggatgagactacaagacatcgggccacatcgcctgccactacttaagtccgattcacttcggctttagctccaagcctttaatctcgcgaagctctttttttttttttaacaacataggagctgtgattggctgttttcagccaatcagcactgactcatttgcatagcctttacaagcggtcacaaactcaagaaacgagcggttttaatagtcttttagaatattgtttatcgaaccgaataaggaactgtgctttgtgattcacatatcagtggaggggtgtggaaatggcaccttgatctcaccctcatcgaaagtggagttgatgtccttccctggctcgctacagacgcacttccgcaatgatagggacttagggtgatagaagtgcaaagcatgactgtcaaatttttggagcaggttttctgacttcggtcggaaaacccctaaaaccagtaagggagaaaggtcaagtaacatataaaggaaggcctatcagaattacaccagacttttcaccagagactatgaaagccagaagagcctggacagatgttatacagacactaagagaacacaaatgccagcccaggctactatacctggccaaactctcaattaccatagatggagaaaccaaagtattccacgacaaaaacaaattcacacaatatctttccacgaatccagcccttcaaaggataatgacagaaaagaagcaatacaaggacggaaatcacgccctagaacaaccaagaaactaatcattcaacaaaccaaaaagaagacagccacaagaacagaatgccaactctaacaacaaaaataaaaggaagcaacaattacttttccttaatatctcttaatatcaatggactcaattccccaataaaaagacatagactaacagactggctacacaaacaggacccaacattctgctgctta

SEQ ID NO: 841 - DNA, 1087 bp, synthetic construct
  source 1..1087: mol_type = other DNA
tatttttaatgaagcagggccatggagcccaagctggccttgaacttctcagcttttgtgctggtatcacagaaatgtggcgctatgcccggtcgggcctgatgttccagagtctttgcagtgtggggaacttgtaaggatgagactacaagacatcgggccacatcgcctgccactacttaagtccgattcacttcggctttagctccaagcctttaatctcgcgaagctctttttttttttttaacaacataggagctgtgattggctgttttcagccaatcagcactgactcatttgcatagcctttacaagcggtcacaaactcaagaaacgagcggttttaatagtcttttagaatattgtttatcgaaccgaataaggaactgtgctttgtgattcacatatcagtggaggggtgtggaaatggcaccttgatctcaccctcatcgaaagtggagttgatgtccttccctggctcgctacagacgcacttccgcaatgatagggacttagggtgatagaagtgcaaagcatgactgtcaaatttttggagcaggttttctgacttcggtcggaaaacccctcccaatttcactggtctacaatgaaagcaaaacagttctcttccccgctccccggtgtgtgagaggggctttgatccttctctggtttcctaggaaacgcgtatgtgctagagccacgctctgagacttccgcctcgtgcggtcccgcttcctttctgcctcctctggcctgcatccgtgggggaggtggctggctgcagggttctccggatctcttctgtgttcccactactcaagcaccgagtggcgttctatggcgtccgcctcggctcagcccgcggccctgagcgcggagcaggccaagggtgaggaaagagcctagtctgggtgtgggccgtcttctggggggagggcgcgatactattctttgcctctccaagtggggcccttgcccattagggcgaagggttgggaggacaagcttatcgggttgcttgcaggcctcggcccactaattccctgcctcttccctcctctgggctcgcccgccgtcctccgcg

SEQ ID NO: 842 - DNA, 1087 bp, synthetic construct
  source 1..1087: mol_type = other DNA
tatttttaatgaagcagggccatggagcccaagctggccttgaacttctcagcttttgtgctggtatcacagaaatgtggcgctatgcccggtcgggcctgatgttccagagtctttgcagtgtggggaacttgtaaggatgagactacaagacatcgggccacatcgcctgccactacttaagtccgattcacttcggctttagctccaagcctttaatctcgcgaagctctttttttttttttaacaacataggagctgtgattggctgttttcagccaatcagcactgactcatttgcatagcctttacaagcggtcacaaactcaagaaacgagcggttttaatagtcttttagaatattgtttatcgaaccgaataaggaactgtgctttgtgattcacatatcagtggaggggtgtggaaatggcaccttgatctcaccctcatcgaaagtggagttgatgtccttccctggctcgctacagacgcacttccgcaatgatagggacttagggtgatagaagtgcaaagcatgactgtcaaatttttggagcaggttttctgacttcggtcggaaaacccctgaatttgttaaattacaggaggaagcttttttagttcattttacaaatactttcttgttaggtagataataccttctaaggttattatctggatcttctaagtctttttatcgctagcaagtctaagtttctggactttggaattagaagttaatgtcgtaggcgggcatggtggtccacgcctttaatcccagagtttgggaggcagacgcaggtggttttctgagttcgaggccatcctgctcttcaatgttagttccaggacagccagggttatacaaagaaaccctgtctcgagaaacaaaacaaacaaaaaaagagtagctgagtgctctgagttgtctctccagccccttagctatttattttcatttaaattatttttgttttattcgcttgtgtgcctgagtttgaatttcccgggattaacagttgaagactagggctggtgagatggctcagcggttaagattgccgactgctcttccaaaggtcctgag

SEQ ID NO: 843 - DNA, 1087 bp, synthetic construct
  source 1..1087: mol_type = other DNA
tatttttaatgaagcagggccatggagcccaagctggccttgaacttctcagcttttgtgctggtatcacagaaatgtggcgctatgcccggtcgggcctgatgttccagagtctttgcagtgtggggaacttgtaaggatgagactacaagacatcgggccacatcgcctgccactacttaagtccgattcacttcggctttagctccaagcctttaatctcgcgaagctctttttttttttttaacaacataggagctgtgattggctgttttcagccaatcagcactgactcatttgcatagcctttacaagcggtcacaaactcaagaaacgagcggttttaatagtcttttagaatattgtttatcgaaccgaataaggaactgtgctttgtgattcacatatcagtggaggggtgtggaaatggcaccttgatctcaccctcatcgaaagtggagttgatgtccttccctggctcgctacagacgcacttccgcaatgatagggacttagggtgatagaagtgcaaagcatgactgtcaaatttttggagcaggttttctgacttcggtcggaaaacccctaccccctaattctacaagaatagaaagcttagcagctcctctgaatggttgctctcaggtgctagtggttgcaagtcgtatgttgatgcctgcctttgccctacctggtgtgtgagcgtgagcgcgccccacctctccagcctctctcttactgtttttcagacaagatgggactgttgttctcctactgctatgtacctcaatttcaattgatcatgcctggacataactgcccatgttgtaaggtcgtctacgttgtaaggtcgtgctcagtttctgatgcctagactagtcacctttccgtttgcctcctgactgtgtaaatgaggcaaatgaaggtggtctcttaactgacatgttagtgtttgacctatgggatagtttctcattgttgagacagaatttctagaagctggtccgctgagcggctaagagcacttgctgatattgcaaaggatctacctgggtttggttctcagcactcacatggaagttcacat

SEQ ID NO: 844 - DNA, 654 bp, synthetic construct
  source 1..654: mol_type = other DNA
tatttttaatgaagcagggccatggagcccaagctggccttgaacttctcagcttttgtgctggtatcacagaaatgtggcgctatgcccggtcgggcctgatgttccagagtctttgcagtgtggggaacttgtaaggatgagactacaagacatcgggccacatcgcctgccactacttaagtccgattcacttcggctttagctccaagcctttaatctcgcgaagctctttttttttttttaacaacataggagctgtgattggctgttttcagccaatcagcactgactcatttgcatagcctttacaagcggtcacaaactcaagaaacgagcggttttaatagtcttttagaatattgtttatcgaaccgaataaggaactgtgctttgtgattcacatatcagtggaggggtgtggaaatggcaccttgatctcaccctcatcgaaagtggagttgatgtccttccctggctcgctacagacgcacttccgcaatgatagggacttagggtgatagaagtgcaaagcatgactgtcaaatttttggagcaggttttctgacttcggtcggaaaaccccttgtagttcctgcaatttaattttcgtttaaaactttattttattctttaacttaaaaaaaatatata

SEQ ID NO: 845 - DNA, 533 bp, synthetic construct; identical to SEQ ID NO: 365
  source 1..533: mol_type = other DNA

SEQ ID NO: 846 - DNA, 559 bp, synthetic construct; identical to SEQ ID NO: 366
  source 1..559: mol_type = other DNA

SEQ ID NO: 847 - DNA, 539 bp, synthetic construct; identical to SEQ ID NO: 367
  source 1..539: mol_type = other DNA

SEQ ID NO: 848 - DNA, 533 bp, synthetic construct; identical to SEQ ID NO: 368
  source 1..533: mol_type = other DNA

SEQ ID NO: 849 - DNA, 1087 bp, synthetic construct
  source 1..1087: mol_type = other DNA
gttctttgcttttacagaccgtctcctgtgtgtccctgtcagagacctgaattcggttcctagcacccatatgttagaacataacgtccaagttggaggctacaagtggcactaaattacacattatcagttttgacaggttggggcaccgtgtaaccctagtaacttagcgaaaggctcctcgaacccaacatcccacctctagctgggagcagctgttttgcaccagcgccgcctacctctccctccgcgtcggccagagcattcccagcaagcactgctctgatttgcatattgactcacggactttcctttactgctatacaaaaaacgacacaacagttctctttgtgaagagctttccctcagcccgagaagaatcgatagtttgccttttagcttcgacaatatacagttgaaagttggttagactttattttcacctttaccgtaagatgggtggaccgacaatgccactgtgcttccgaacgcgctcgagcaatgatagggacttagggtgatagaagtgcaaagcatgactgtcaaatttttggagcaggttttctgacttcggtcggaaaacccctactttctggagtttcaaaaacagactgtacgccaagggtcatatctttttttgtattggtttgtgtcttggttggtgtcttaggtgttaatcctacagtggagggtttatgggaataggaagtaacatgtcgcctgcatgtcataggagaaaaagcgagcatcagccgtatcggctttgtaacacaaattagctatcgtgaagtccgctcagctcttccctttctaccctggctgctttttgcagggattggtccgtggtctccagtctcttgggttctcaccctgtgtgaaaatcttcgtgtttttccctaccccccagtcacctcttacacagcctctgcttccaagcgcagcccccacaggagtttgtaggatttctgtgctagcggggaatgtgttctcacctcatagagccaggtagaaattatgcagatgggcagttctctgggaagaaagcagggcctttggggctctcagtgtccccgttgggttgtagaca

SEQ ID NO: 850 - DNA, 1087 bp, synthetic construct
  source 1..1087: mol_type = other DNA
gttctttgcttttacagaccgtctcctgtgtgtccctgtcagagacctgaattcggttcctagcacccatatgttagaacataacgtccaagttggaggctacaagtggcactaaattacacattatcagttttgacaggttggggcaccgtgtaaccctagtaacttagcgaaaggctcctcgaacccaacatcccacctctagctgggagcagctgttttgcaccagcgccgcctacctctccctccgcgtcggccagagcattcccagcaagcactgctctgatttgcatattgactcacggactttcctttactgctatacaaaaaacgacacaacagttctctttgtgaagagctttccctcagcccgagaagaatcgatagtttgccttttagcttcgacaatatacagttgaaagttggttagactttattttcacctttaccgtaagatgggtggaccgacaatgccactgtgcttccgaacgcgctcgagcaatgatagggacttagggtgatagaagtgcaaagcatgactgtcaaatttttggagcaggttttctgacttcggtcggaaaacccctactttctggagtttctaaaagtagactgtacgctaagggtcatatctttttttgttttggtttgtgtcttggttggcgtcttaaatgttaatcctacagtggagggctggcgaataggaagtaacatgtcgcctgcacgccataggagaaaaagcgagcatcagccgtatcggctttgtaacacaaattagctatcgtgaagtccgctcagctcttccctttctaccctggctgctttttgcagggattggtccgtggtctccagtctcttgggttctcaccctgtgtgaaaatcttcctgtttttccctaccccccaagtcacctcttacacagcctctgcttccaagcgcagcccccacaggagtttgtaggatttctgtgctagcggggagtgtgttctcacctcatagagccaggtagaaactacgcagatgggtgctgttctccaggaagaaagcagggcctttggggctctcagtgtccccgttgggttgtaga

SEQ ID NO: 851 - DNA, 1087 bp, synthetic construct
  source 1..1087: mol_type = other DNA
gttctttgcttttacagaccgtctcctgtgtgtccctgtcagagacctgaattcggttcctagcacccatatgttagaacataacgtccaagttggaggctacaagtggcactaaattacacattatcagttttgacaggttggggcaccgtgtaaccctagtaacttagcgaaaggctcctcgaacccaacatcccacctctagctgggagcagctgttttgcaccagcgccgcctacctctccctccgcgtcggccagagcattcccagcaagcactgctctgatttgcatattgactcacggactttcctttactgctatacaaaaaacgacacaacagttctctttgtgaagagctttccctcagcccgagaagaatcgatagtttgccttttagcttcgacaatatacagttgaaagttggttagactttattttcacctttaccgtaagatgggtggaccgacaatgccactgtgcttccgaacgcgctcgagcaatgatagggacttagggtgatagaagtgcaaagcatgactgtcaaatttttggagcaggttttctgacttcggtcggaaaacccctactttctggagtttcaaaaacagaccgtacgccaagggtcatgtcttttttcgtattggtttgtgtcttagttgttaatcctacagtggaggcctggggaataagaagtaacatgtggcctgcacgccataggagaaaaagcgagcatcagccgtatcggctttgtaacacaaattagctatcgtgaagtccgctcagctcttccatttctaccctggctgctttttgcagggattggtccgtggtctccagtctcttgggttctcaccctgtgtgaaaatcttcgtgtttttccctaccccccaagtcacctcttacacagcctctgcttccaagcgcagcccccacaggagtttgtaggatttctgtgctagcggggagtgtgttctcacctcatagagccaggtagaaattatgcagatgggcgctgttctctgggaagaaagcagggcctttggggctctcagtgtccccgttgggttgtagacataacactctta

SEQ ID NO: 852 - DNA, 891 bp, synthetic construct
  source 1..891: mol_type = other DNA
gttctttgcttttacagaccgtctcctgtgtgtccctgtcagagacctgaattcggttcctagcacccatatgttagaacataacgtccaagttggaggctacaagtggcactaaattacacattatcagttttgacaggttggggcaccgtgtaaccctagtaacttagcgaaaggctcctcgaacccaacatcccacctctagctgggagcagctgttttgcaccagcgccgcctacctctccctccgcgtcggccagagcattcccagcaagcactgctctgatttgcatattgactcacggactttcctttactgctatacaaaaaacgacacaacagttctctttgtgaagagctttccctcagcccgagaagaatcgatagtttgccttttagcttcgacaatatacagttgaaagttggttagactttattttcacctttaccgtaagatgggtggaccgacaatgccactgtgcttccgaacgcgctcgagcaatgatagggacttagggtgatagaagtgcaaagcatgactgtcaaatttttggagcaggttttctgacttcggtcggaaaacccctcctccggggatacaacgtgtttcctaaaagtagagggaggtaagagacggtagcacctgcggggcggcttgcacgccgagtgcctgtgacgcgccggcttaacttaactgcttccctgaagtaccttgaggttcctgatgtgcgggcggtagacggtaggcttatgcggcacgctgtcgtttccaccgtggctactgcgctttgggaaggccacgacctcctcctttggggaggtccttaggatctcagcttggcagtcgagtgggtggcgaccttttaaaggaatgggacccacccggagttc

SEQ ID NO: 853 - DNA, 1079 bp, synthetic construct
  source 1..1079: mol_type = other DNA
gttctttgcttttacagaccgtctcctgtgtgtccctgtcagagacctgaattcggttcctagcacccatatgttagaacataacgtccaagttggaggctacaagtggcactaaattacacattatcagttttgacaggttggggcaccgtgtaaccctagtaacttagcgaaaggctcctcgaacccaacatcccacctctagctgggagcagctgttttgcaccagcgccgcctacctctccctccgcgtcggccagagcattcccagcaagcactgctctgatttgcatattgactcacggactttcctttactgctatacaaaaaacgacacaacagttctctttgtgaagagctttccctcagcccgagaagaatcgatagtttgccttttagcttcgacaatatacagttgaaagttggttagactttattttcacctttaccgtaagatgggtggaccgacaatgccactgtgcttccgaacgcgctcgagcaatgatagggacttagggtgatagaagtgcaaagcatgactgtcaaatttttggagcaggttttctgacttcggtcggaaaacccctttcccttcttgtaatacaaaataataacaaccacagaggacatcgcaagtaaaatgtgtataacaaccccatctaaagaaccctatcatctttctactatctgtctacctaaatatgtatagtataaataaccctatatagcactctaagcaacttaagttaggtaacttagaaaactcttttttttttttgagactgagtctcactctgtcgcacccaggctggagtgcagtggcgtgatctcggctcactgcaacctccaccttctgggttcaagtgattctcccatctcagtctcccaagtagctgggattacaggcacgccaccatgccctgctacatttttttttttttagtagagatgaggtttcaccacattggccaggctgttctcgaactcctgacctcaggtgatccgcccaccttggcctcatgaagtgctgggattacaggtgtgagccactgtacccagccagaaaactcttaaaaaac

SEQ ID NO: 854 - DNA, 969 bp, synthetic construct
  source 1..969: mol_type = other DNA
gttctttgcttttacagaccgtctcctgtgtgtccctgtcagagacctgaattcggttcctagcacccatatgttagaacataacgtccaagttggaggctacaagtggcactaaattacacattatcagttttgacaggttggggcaccgtgtaaccctagtaacttagcgaaaggctcctcgaacccaacatcccacctctagctgggagcagctgttttgcaccagcgccgcctacctctccctccgcgtcggccagagcattcccagcaagcactgctctgatttgcatattgactcacggactttcctttactgctatacaaaaaacgacacaacagttctctttgtgaagagctttccctcagcccgagaagaatcgatagtttgccttttagcttcgacaatatacagttgaaagttggttagactttattttcacctttaccgtaagatgggtggaccgacaatgccactgtgcttccgaacgcgctcgagcaatgatagggacttagggtgatagaagtgcaaagcatgactgtcaaatttttggagcaggttttctgacttcggtcggaaaacccctctgaattttcttgcagttgaacaacagaggctttttttgtgtgtgtgggggtgcttggttttgggaggttgaagagtacttgttcgcaaactctctaaatgagagatggggaagtgtcttaccagctgattcgcgagagcacctgcaagtttacctgttttagtgatttgcgtttatgaaagttggagttgctgattttgtgatctctacttttaaggtaaaagcagggcggtgttgacttttcttgccagttggctgtcctgttttctttctcgcactgttttctttttgagacgaagtctgtcgctcaggctggagtgcactggcgtgatctcggctcgctgcaaactttgccgaacccctgtttagcgatttccgtttg

SEQ ID NO: 855 - DNA, 1087 bp, synthetic construct
  source 1..1087: mol_type = other DNA
gttctttgcttttacagaccgtctcctgtgtgtccctgtcagagacctgaattcggttcctagcacccatatgttagaacataacgtccaagttggaggctacaagtggcactaaattacacattatcagttttgacaggttggggcaccgtgtaaccctagtaacttagcgaaaggctcctcgaacccaacatcccacctctagctgggagcagctgttttgcaccagcgccgcctacctctccctccgcgtcggccagagcattcccagcaagcactgctctgatttgcatattgactcacggactttcctttactgctatacaaaaaacgacacaacagttctctttgtgaagagctttccctcagcccgagaagaatcgatagtttgccttttagcttcgacaatatacagttgaaagttggttagactttattttcacctttaccgtaagatgggtggaccgacaatgccactgtgcttccgaacgcgctcgagcaatgatagggacttagggtgatagaagtgcaaagcatgactgtcaaatttttggagcaggttttctgacttcggtcggaaaacccctatatgtggtaatccaacaatagaaattatttttaagtttgtgtgttcctttttctgttcaatggtgcttttgatattgttgtaaagcagtgactagcagattctgtgtggtaaaagcactgaaccctgtttagttcttttctccctaccttattggtaattatttctgtgtatatatgttccaaagaaatgcggcttgtatattcatgcttttcaactttttgtgatagacagttgatacacaagtagtacctcctccgggatcttcttagtcaagactgtttggtagatgcatgttttttgttacttgtaatgtacagtattcagttcattttctttttgcagcactgtccggttgaaacacaacgcgaggatcgggcgtggtggctcacgcctgtaatcccagcactttgggaggccgaggcaggacaatcaagaccaatcctggtcatcaaggcaggagaatcaagaccatcgaggtcaggagatcaagaccatcct

SEQ ID NO: 856 - DNA, 1085 bp, synthetic construct
  source 1..1085: mol_type = other DNA
gttctttgcttttacagaccgtctcctgtgtgtccctgtcagagacctgaattcggttcctagcacccatatgttagaacataacgtccaagttggaggctacaagtggcactaaattacacattatcagttttgacaggttggggcaccgtgtaaccctagtaacttagcgaaaggctcctcgaacccaacatcccacctctagctgggagcagctgttttgcaccagcgccgcctacctctccctccgcgtcggccagagcattcccagcaagcactgctctgatttgcatattgactcacggactttcctttactgctatacaaaaaacgacacaacagttctctttgtgaagagctttccctcagcccgagaagaatcgatagtttgccttttagcttcgacaatatacagttgaaagttggttagactttattttcacctttaccgtaagatgggtggaccgacaatgccactgtgcttccgaacgcgctcgagcaatgatagggacttagggtgatagaagtgcaaagcatgactgtcaaatttttggagcaggttttctgacttcggtcggaaaacccctacatcaggttgtttttctgtttttacatcaggttgtttttctgtttggttttttttttacaccacgtttatacgccggtgcacggtttaccactgaaaacacctttcatctacaggtgatatcttttaacacaaataaaatgtagtagtcctaggagacggaatagaaggaggtggggcctaggcagattcatctctgcggtgcattttgcctctggccctcgggccctagtttgcgatctttcccatcttgcctctgcttccctctgcacaatcctgagtattgcagtaccttacacttaaggaaatttcgtcttgccaaagttgatccatttcagctccgaaacataacaggaactagtgcaacgataaacgtatgaggaacttgcaataagagtgacagaatcctttgaatcaaaaaaaaaaaaagccaccacttaatgagtatctaccatatgtcaagggcttcaccaatatttcattgaaatattccagacca

SEQ ID NO: 857 - DNA, 1087 bp, synthetic construct
  source 1..1087: mol_type = other DNA
gttctttgcttttacagaccgtctcctgtgtgtccctgtcagagacctgaattcggttcctagcacccatatgttagaacataacgtccaagttggaggctacaagtggcactaaattacacattatcagttttgacaggttggggcaccgtgtaaccctagtaacttagcgaaaggctcctcgaacccaacatcccacctctagctgggagcagctgttttgcaccagcgccgcctacctctccctccgcgtcggccagagcattcccagcaagcactgctctgatttgcatattgactcacggactttcctttactgctatacaaaaaacgacacaacagttctctttgtgaagagctttccctcagcccgagaagaatcgatagtttgccttttagcttcgacaatatacagttgaaagttggttagactttattttcacctttaccgtaagatgggtggaccgacaatgccactgtgcttccgaacgcgctcgagcaatgatagggacttagggtgatagaagtgcaaagcatgactgtcaaatttttggagcaggttttctgacttcggtcggaaaacccctcttatgatgtttgttgccaatgatagattgttttcactgtgcaaaaattatgggtagttttggtggtcttgatgcagttgtaagcttggggtatgaaggtttgggccacgcctgggcgcttccggctgcgccggatgctgtttcctttccgctcccaggggcgttgggaacggttgtaggacgtggctctttattcgtgagttttccatttacctccgctgaacctagagcttcagacgccctatggcgtccgcctcgacccaaccggcggccttgagcgctgagcaagcaaagggtgagaatcgtcctagtcaaggcataggctgctggcctggggtagtcaaggcatgggctgctggtctggggaggatgcgggcggaggatgtggggcgacaaacctggctacgtccgccgggaaaatggggtaggggacgccgggtaccgtccttctaagtggggcgcttgcccccaagacttgggatcttattgggttacctaca

SEQ ID NO: 858 - DNA, 1085 bp, synthetic construct
  source 1..1085: mol_type = other DNA
gttctttgcttttacagaccgtctcctgtgtgtccctgtcagagacctgaattcggttcctagcacccatatgttagaacataacgtccaagttggaggctacaagtggcactaaattacacattatcagttttgacaggttggggcaccgtgtaaccctagtaacttagcgaaaggctcctcgaacccaacatcccacctctagctgggagcagctgttttgcaccagcgccgcctacctctccctccgcgtcggccagagcattcccagcaagcactgctctgatttgcatattgactcacggactttcctttactgctatacaaaaaacgacacaacagttctctttgtgaagagctttccctcagcccgagaagaatcgatagtttgccttttagcttcgacaatatacagttgaaagttggttagactttattttcacctttaccgtaagatgggtggaccgacaatgccactgtgcttccgaacgcgctcgagcaatgatagggacttagggtgatagaagtgcaaagcatgactgtcaaatttttggagcaggttttctgacttcggtcggaaaaccccttctttactgttatatgttaggcgaaatattacgcgtttggagtaagtggtgctttttgtaactgaaaagagattctgtgtgtgtttttttttttttagaggctgcatagttatttgtatgaaccgcaggtgacctaattagcaaggtaattcagacctgtatcctagcacttaagaagtggaagtgggataaccctgcgtgttctcgtgtgggaggctagcttaagcaacaaagcaggaaggccccaccaacaaaagaatttaaaaattatacgtgcgtggtggcgcgcgtatgaggaaattatttggcaactgtgttacagtatagcagcaaatggaatagacctagtccctgactttaggagacctgcctcagccccccgaatggctgggactacaggcgtgcgcctccgcgcccagctaatttttgcatttttggtagagacgggttcaccatgttggccaggatggtctccatctcttcatctggtgatccgcc

SEQ ID NO: 859 - DNA, 1087 bp, synthetic construct
  source 1..1087: mol_type = other DNA
gttctttgcttttacagaccgtctcctgtgtgtccctgtcagagacctgaattcggttcctagcacccatatgttagaacataacgtccaagttggaggctacaagtggcactaaattacacattatcagttttgacaggttggggcaccgtgtaaccctagtaacttagcgaaaggctcctcgaacccaacatcccacctctagctgggagcagctgttttgcaccagcgccgcctacctctccctccgcgtcggccagagcattcccagcaagcactgctctgatttgcatattgactcacggactttcctttactgctatacaaaaaacgacacaacagttctctttgtgaagagctttccctcagcccgagaagaatcgatagtttgccttttagcttcgacaatatacagttgaaagttggttagactttattttcacctttaccgtaagatgggtggaccgacaatgccactgtgcttccgaacgcgctcgagcaatgatagggacttagggtgatagaagtgcaaagcatgactgtcaaatttttggagcaggttttctgacttcggtcggaaaacccctaccttattcacgcctaaaaagtagactgactgtggggtggtcgtgttttttgtttcttgttggtaggtggtgaatgcgtttttttcgttgttttctccgttactcaggctgccagttgcttggcagtcttgtcgctggctgtggacgctctgcacttcatcaccgtccccagctgcgctttgagccggtctaaggttgcccacagtattgacgttgggacccacgaaactggcaatttccatgtgtgcggccttacccagttctcccaaacttctgcgtataaccgcttctctgtgcttcagaaagataagtccggccccggcctcacacagcagctcagttcgtgacagcgtttaatatgtaaaatggagcaaataatttatagggcgttgggagagttaaagagactaattcatttacgtgttaaatacagggaatggcttttgcattgatataaccccagcctccagcatgcgccagacctgacgtaggtgttcggc

SEQ ID NO: 860 - DNA, 1087 bp, synthetic construct
  source 1..1087: mol_type = other DNA
gttctttgcttttacagaccgtctcctgtgtgtccctgtcagagacctgaattcggttcctagcacccatatgttagaacataacgtccaagttggaggctacaagtggcactaaattacacattatcagttttgacaggttggggcaccgtgtaaccctagtaacttagcgaaaggctcctcgaacccaacatcccacctctagctgggagcagctgttttgcaccagcgccgcctacctctccctccgcgtcggccagagcattcccagcaagcactgctctgatttgcatattgactcacggactttcctttactgctatacaaaaaacgacacaacagttctctttgtgaagagctttccctcagcccgagaagaatcgatagtttgccttttagcttcgacaatatacagttgaaagttggttagactttattttcacctttaccgtaagatgggtggaccgacaatgccactgtgcttccgaacgcgctcgagcaatgatagggacttagggtgatagaagtgcaaagcatgactgtcaaatttttggagcaggttttctgacttcggtcggaaaaccccttttgacccattacccatctaagttagatgcttttttaaatgttttttaatttttaaatttttaatttttttcattatttattttttatttttgagacggatctcggctcactgtaacctccacctcccgggttcaagcgattctcctgactcagcctcccgagtagctgggattacaggcgcgcgccaccatgcccggctaatttttctatttttagtaaagacggggtttcgccatgttgaccagggtggtcttgaactcctgacgtcaggtgatcctcctgcctcgtgctgggattgcaggcgtgagccaccgctcccggcccttagatgctttttaatcagcaagtacgcaatgctttcctgacaggaatgtcaagtccgtcaggaaatccacataagggtgttaagcaggcaaagtaccacatacagattaaaatcaaaagcactgtcaacgcttatttaatttatacagtagaccctaacttttctaattttgtg

SEQ ID NO: 861 - DNA, 1087 bp, synthetic construct
  source 1..1087: mol_type = other DNA
gttctttgcttttacagaccgtctcctgtgtgtccctgtcagagacctgaattcggttcctagcacccatatgttagaacataacgtccaagttggaggctacaagtggcactaaattacacattatcagttttgacaggttggggcaccgtgtaaccctagtaacttagcgaaaggctcctcgaacccaacatcccacctctagctgggagcagctgttttgcaccagcgccgcctacctctccctccgcgtcggccagagcattcccagcaagcactgctctgatttgcatattgactcacggactttcctttactgctatacaaaaaacgacacaacagttctctttgtgaagagctttccctcagcccgagaagaatcgatagtttgccttttagcttcgacaatatacagttgaaagttggttagactttattttcacctttaccgtaagatgggtggaccgacaatgccactgtgcttccgaacgcgctcgagcaatgatagggacttagggtgatagaagtgcaaagcatgactgtcaaatttttggagcaggttttctgacttcggtcggaaaacccctgtttacttggttttaaaaatagcttgcactagcgataccgcgaatatggttattaggtttgttaggcacagtcgtgtcttactatagaaaaataacgtagtgttcattttgctgcctgtatgtgttaatttgtccttattgcgccattgttcttgttaagtcttctgtaaggagttgcgggtttcaaactgtcagtctgagagcataagctcacttttcagtcagttgaattgaatgttacattcgattggttctggatattgatattacccaaggcttgtcctgtttgtaagtcttttcctacacctgacaatatgattatgtttacaatgtccctagaactctgggtgtatcgttcccactgaataaaatttgatctctaagttgacctataaatttaagtaccaaaaaactggtttgtaagattttggaaggcagaggcagggaagagaccaacgtggtctacatataaagtaccaggtacatataaagtaccaggt

SEQ ID NO: 862 - DNA, 1083 bp, synthetic construct
  source 1..1083: mol_type = other DNA
gttctttgcttttacagaccgtctcctgtgtgtccctgtcagagacctgaattcggttcctagcacccatatgttagaacataacgtccaagttggaggctacaagtggcactaaattacacattatcagttttgacaggttggggcaccgtgtaaccctagtaacttagcgaaaggctcctcgaacccaacatcccacctctagctgggagcagctgttttgcaccagcgccgcctacctctccctccgcgtcggccagagcattcccagcaagcactgctctgatttgcatattgactcacggactttcctttactgctatacaaaaaacgacacaacagttctctttgtgaagagctttccctcagcccgagaagaatcgatagtttgccttttagcttcgacaatatacagttgaaagttggttagactttattttcacctttaccgtaagatgggtggaccgacaatgccactgtgcttccgaacgcgctcgagcaatgatagggacttagggtgatagaagtgcaaagcatgactgtcaaatttttggagcaggttttctgacttcggtcggaaaacccctatttttgtggtgctaaaagttagattgcattccgcccttctcacgtctctttacgtgttgtttgcgaggcgtggcctcggaggtaaatggtctccttttacctcagataagcttacctttgctctgtgagtaagaatgtagctacacttccaaatttagctattgtcctttgcggtccaaatgaaaatattaccttccgatctaacaatgttaaactagtcccaggcccttctatcgattgccagaatagactagactactacacagacacaccctctcaaatcaggccagctcctgcaacctgcacctacagtttgtcccctgggacaaatgaaaggacaggccctctttcccccccccccccaaatcagagcacacacagatcttggggtctggggcagaaatttcgttcatggaaaaaacaaacaaacaaacaaacacgatcaaaggaagctcgttccctttggcctcagggtttcttagacgccgtgttccc

SEQ ID NO: 863 - DNA, 1084 bp, synthetic construct
  source 1..1084: mol_type = other DNA
gttctttgcttttacagaccgtctcctgtgtgtccctgtcagagacctgaattcggttcctagcacccatatgttagaacataacgtccaagttggaggctacaagtggcactaaattacacattatcagttttgacaggttggggcaccgtgtaaccctagtaacttagcgaaaggctcctcgaacccaacatcccacctctagctgggagcagctgttttgcaccagcgccgcctacctctccctccgcgtcggccagagcattcccagcaagcactgctctgatttgcatattgactcacggactttcctttactgctatacaaaaaacgacacaacagttctctttgtgaagagctttccctcagcccgagaagaatcgatagtttgccttttagcttcgacaatatacagttgaaagttggttagactttattttcacctttaccgtaagatgggtggaccgacaatgccactgtgcttccgaacgcgctcgagcaatgatagggacttagggtgatagaagtgcaaagcatgactgtcaaatttttggagcaggttttctgacttcggtcggaaaacccctataactggtaaccaaaagcagattactttcccccttgtggtcttcgcgtttgcggacgggagagaactttcggccattttccttttagaaatttaacttcttgaaggccaccaggtgacccttacttccctctcacctttccttctacctgtactttctctattaaaaagcctgcagaagtacccttgacaaattgccaaaaatgacacctaaaaaaaaaaaaaggaaaaacgacaccttaggtaattataggttgtaagaaaaagatttgacctcttggagtttttatttcttaataccaaaggacacccaaggaacgtatctctcaaaattgggtttcaaacctcagccgtttccttcttagttccagtgcttaacacgcaacagacctgcacaccactacactgcatacgagttttaaagttaataaatcagtcacccctccatagtcttctacctacttgaagacagaaacggctgctaggaagcaattcttc

SEQ ID NO: 864 - DNA, 1087 bp, synthetic construct
  source 1..1087: mol_type = other DNA
gttctttgcttttacagaccgtctcctgtgtgtccctgtcagagacctgaattcggttcctagcacccatatgttagaacataacgtccaagttggaggctacaagtggcactaaattacacattatcagttttgacaggttggggcaccgtgtaaccctagtaacttagcgaaaggctcctcgaacccaacatcccacctctagctgggagcagctgttttgcaccagcgccgcctacctctccctccgcgtcggccagagcattcccagcaagcactgctctgatttgcatattgactcacggactttcctttactgctatacaaaaaacgacacaacagttctctttgtgaagagctttccctcagcccgagaagaatcgatagtttgccttttagcttcgacaatatacagttgaaagttggttagactttattttcacctttaccgtaagatgggtggaccgacaatgccactgtgcttccgaacgcgctcgagcaatgatagggacttagggtgatagaagtgcaaagcatgactgtcaaatttttggagcaggttttctgacttcggtcggaaaacccctctggggaataagagtggtttaaagaaagaacaatttgagagatctgcttagatctaataaaacccaagtatagtttctttagacgtcttatatctcacgtaggacctcttatttcagactcactgcaagaacaagctaaagaactatatacagtcaggaacaaggtgagccatcgcggttctcagtcccatgatcttaagagtttttcctcttcccctcttccctggctgtcctggagctcactctgtagaccaggctggtctcaaactcagaaatccacttacctctgcctcccaagggctgggattaaaggcatgcaccaccattgcccggcagggtatgtggactatgctgtccttcaactcagagatcgtggtactttaaatctcattttccgaaagaaaagaaaagaaaggaaggggggaaataaagccagtatattttgcacccacaatctgaagttctacaaatattgttagaaaatgcaaaggacccaagtc

SEQ ID NO: 865 - DNA, 1087 bp, synthetic construct
  source 1..1087: mol_type = other DNA
gttctttgcttttacagaccgtctcctgtgtgtccctgtcagagacctgaattcggttcctagcacccatatgttagaacataacgtccaagttggaggctacaagtggcactaaattacacattatcagttttgacaggttggggcaccgtgtaaccctagtaacttagcgaaaggctcctcgaacccaacatcccacctctagctgggagcagctgttttgcaccagcgccgcctacctctccctccgcgtcggccagagcattcccagcaagcactgctctgatttgcatattgactcacggactttcctttactgctatacaaaaaacgacacaacagttctctttgtgaagagctttccctcagcccgagaagaatcgatagtttgccttttagcttcgacaatatacagttgaaagttggttagactttattttcacctttaccgtaagatgggtggaccgacaatgccactgtgcttccgaacgcgctcgagcaatgatagggacttagggtgatagaagtgcaaagcatgactgtcaaatttttggagcaggttttctgacttcggtcggaaaacccctctcggtttatcttaaagggttttaaatatagaaagcttccttagtcttatgggtgagagtgctgtttaagccttacctaggtatgtctttgaacatttattacagattgttatttgtgactatgaccactcaggtgttctgttcttgtgaatttagacacactcagaaaggctacacactcaaagaccacaccaaagtgaagtactatctgggccgtgaaactggtcacatatcagttattttgcagtaaaacaaggaagtcaatcatactgcttcagtgggtcagggagtcaagaatgcacagtacaagagctggtgagattcctcagcaggtaagagcactgaatgctcttccaaagattctgagttcaaatcccagcaaccacgtggtggatttgaacaaaggatgaaaacaaccatccataaccagatctgatgccctcttctggagtgtcaaaagacagctatggtgtacttacataaataaataagtaaaaaca

SEQ ID NO: 866 - DNA, 1087 bp, synthetic construct
  source 1..1087: mol_type = other DNA
gttctttgcttttacagaccgtctcctgtgtgtccctgtcagagacctgaattcggttcctagcacccatatgttagaacataacgtccaagttggaggctacaagtggcactaaattacacattatcagttttgacaggttggggcaccgtgtaaccctagtaacttagcgaaaggctcctcgaacccaacatcccacctctagctgggagcagctgttttgcaccagcgccgcctacctctccctccgcgtcggccagagcattcccagcaagcactgctctgatttgcatattgactcacggactttcctttactgctatacaaaaaacgacacaacagttctctttgtgaagagctttccctcagcccgagaagaatcgatagtttgccttttagcttcgacaatatacagttgaaagttggttagactttattttcacctttaccgtaagatgggtggaccgacaatgccactgtgcttccgaacgcgctcgagcaatgatagggacttagggtgatagaagtgcaaagcatgactgtcaaatttttggagcaggttttctgacttcggtcggaaaacccctccacattttgtgtttaaaaatagaaatatttaagtgagatcagtttaaatctgctttatctagggtgtctaactgcttgcatctttttaacttttccttatttgtgagaaggtctgtaaaacttattatatgttagtacactgtagctgtcttcagacactccagaagagggattcagatcaccttacagatggttttgagccaccatgtggttgctgggatttgaactcaggacctttagaaaagtagttgggtgctcttacccgctgagccatctcaccagccctttttttttcttttttccagttcgggtttctctgtgtgtagccctggctgtcctggaactcattctgtagaccgggctggcctcgaactcagaaatctgcctgcctctgcctcccaagtgctgggattaaaggaatgtgccttcattgcccggctctagggctttttgttgttgtttgtttgtttgtttgtttgtttgcttttgtggatggcct

SEQ ID NO: 867 - DNA, 1087 bp, synthetic construct
  source 1..1087: mol_type = other DNA
gttctttgcttttacagaccgtctcctgtgtgtccctgtcagagacctgaattcggttcctagcacccatatgttagaacataacgtccaagttggaggctacaagtggcactaaattacacattatcagttttgacaggttggggcaccgtgtaaccctagtaacttagcgaaaggctcctcgaacccaacatcccacctctagctgggagcagctgttttgcaccagcgccgcctacctctccctccgcgtcggccagagcattcccagcaagcactgctctgatttgcatattgactcacggactttcctttactgctatacaaaaaacgacacaacagttctctttgtgaagagctttccctcagcccgagaagaatcgatagtttgccttttagcttcgacaatatacagttgaaagttggttagactttattttcacctttaccgtaagatgggtggaccgacaatgccactgtgcttccgaacgcgctcgagcaatgatagggacttagggtgatagaagtgcaaagcatgactgtcaaatttttggagcaggttttctgacttcggtcggaaaacccctaaaaccagtaagggagaaaggtcaagtaacatataaaggaaggcctatcagaattacaccagacttttcaccagagactatgaaagccagaagagcctggacagatgttatacagacactaagagaacacaaatgccagcccaggctactatacctggccaaactctcaattaccatagatggagaaaccaaagtattccacgacaaaaacaaattcacacaatatctttccacgaatccagcccttcaaaggataatgacagaaaagaagcaatacaaggacggaaatcacgccctagaacaaccaagaaactaatcattcaacaaaccaaaaagaagacagccacaagaacagaatgccaactctaacaacaaaaataaaaggaagcaacaattacttttccttaatatctcttaatatcaatggactcaattccccaataaaaagacatagactaacagactggctacacaaacaggacccaacattctgctgctta

SEQ ID NO: 868 - DNA, 1087 bp, synthetic construct
  source 1..1087: mol_type = other DNA
gttctttgcttttacagaccgtctcctgtgtgtccctgtcagagacctgaattcggttcctagcacccatatgttagaacataacgtccaagttggaggctacaagtggcactaaattacacattatcagttttgacaggttggggcaccgtgtaaccctagtaacttagcgaaaggctcctcgaacccaacatcccacctctagctgggagcagctgttttgcaccagcgccgcctacctctccctccgcgtcggccagagcattcccagcaagcactgctctgatttgcatattgactcacggactttcctttactgctatacaaaaaacgacacaacagttctctttgtgaagagctttccctcagcccgagaagaatcgatagtttgccttttagcttcgacaatatacagttgaaagttggttagactttattttcacctttaccgtaagatgggtggaccgacaatgccactgtgcttccgaacgcgctcgagcaatgatagggacttagggtgatagaagtgcaaagcatgactgtcaaatttttggagcaggttttctgacttcggtcggaaaacccctcccaatttcactggtctacaatgaaagcaaaacagttctcttccccgctccccggtgtgtgagaggggctttgatccttctctggtttcctaggaaacgcgtatgtgctagagccacgctctgagacttccgcctcgtgcggtcccgcttcctttctgcctcctctggcctgcatccgtgggggaggtggctggctgcagggttctccggatctcttctgtgttcccactactcaagcaccgagtggcgttctatggcgtccgcctcggctcagcccgcggccctgagcgcggagcaggccaagggtgaggaaagagcctagtctgggtgtgggccgtcttctggggggagggcgcgatactattctttgcctctccaagtggggcccttgcccattagggcgaagggttgggaggacaagcttatcgggttgcttgcaggcctcggcccactaattccctgcctcttccctcctctgggctcgcccgccgtcctccgcg

SEQ ID NO: 869 - DNA, 1087 bp, synthetic construct
  source 1..1087: mol_type = other DNA
gttctttgcttttacagaccgtctcctgtgtgtccctgtcagagacctgaattcggttcctagcacccatatgttagaacataacgtccaagttggaggctacaagtggcactaaattacacattatcagttttgacaggttggggcaccgtgtaaccctagtaacttagcgaaaggctcctcgaacccaacatcccacctctagctgggagcagctgttttgcaccagcgccgcctacctctccctccgcgtcggccagagcattcccagcaagcactgctctgatttgcatattgactcacggactttcctttactgctatacaaaaaacgacacaacagttctctttgtgaagagctttccctcagcccgagaagaatcgatagtttgccttttagcttcgacaatatacagttgaaagttggttagactttattttcacctttaccgtaagatgggtggaccgacaatgccactgtgcttccgaacgcgctcgagcaatgatagggacttagggtgatagaagtgcaaagcatgactgtcaaatttttggagcaggttttctgacttcggtcggaaaacccctgaatttgttaaattacaggaggaagcttttttagttcattttacaaatactttcttgttaggtagataataccttctaaggttattatctggatcttctaagtctttttatcgctagcaagtctaagtttctggactttggaattagaagttaatgtcgtaggcgggcatggtggtccacgcctttaatcccagagtttgggaggcagacgcaggtggttttctgagttcgaggccatcctgctcttcaatgttagttccaggacagccagggttatacaaagaaaccctgtctcgagaaacaaaacaaacaaaaaaagagtagctgagtgctctgagttgtctctccagccccttagctatttattttcatttaaattatttttgttttattcgcttgtgtgcctgagtttgaatttcccgggattaacagttgaagactagggctggtgagatggctcagcggttaagattgccgactgctcttccaaaggtcctgag

SEQ ID NO: 870 - DNA, 1087 bp, synthetic construct
  source 1..1087: mol_type = other DNA
gttctttgcttttacagaccgtctcctgtgtgtccctgtcagagacctgaattcggttcctagcacccatatgttagaacataacgtccaagttggaggctacaagtggcactaaattacacattatcagttttgacaggttggggcaccgtgtaaccctagtaacttagcgaaaggctcctcgaacccaacatcccacctctagctgggagcagctgttttgcaccagcgccgcctacctctccctccgcgtcggccagagcattcccagcaagcactgctctgatttgcatattgactcacggactttcctttactgctatacaaaaaacgacacaacagttctctttgtgaagagctttccctcagcccgagaagaatcgatagtttgccttttagcttcgacaatatacagttgaaagttggttagactttattttcacctttaccgtaagatgggtggaccgacaatgccactgtgcttccgaacgcgctcgagcaatgatagggacttagggtgatagaagtgcaaagcatgactgtcaaatttttggagcaggttttctgacttcggtcggaaaacccctaccccctaattctacaagaatagaaagcttagcagctcctctgaatggttgctctcaggtgctagtggttgcaagtcgtatgttgatgcctgcctttgccctacctggtgtgtgagcgtgagcgcgccccacctctccagcctctctcttactgtttttcagacaagatgggactgttgttctcctactgctatgtacctcaatttcaattgatcatgcctggacataactgcccatgttgtaaggtcgtctacgttgtaaggtcgtgctcagtttctgatgcctagactagtcacctttccgtttgcctcctgactgtgtaaatgaggcaaatgaaggtggtctcttaactgacatgttagtgtttgacctatgggatagtttctcattgttgagacagaatttctagaagctggtccgctgagcggctaagagcacttgctgatattgcaaaggatctacctgggtttggttctcagcactcacatggaagttcacat

SEQ ID NO: 871 - DNA, 654 bp, synthetic construct
  source 1..654: mol_type = other DNA
gttctttgcttttacagaccgtctcctgtgtgtccctgtcagagacctgaattcggttcctagcacccatatgttagaacataacgtccaagttggaggctacaagtggcactaaattacacattatcagttttgacaggttggggcaccgtgtaaccctagtaacttagcgaaaggctcctcgaacccaacatcccacctctagctgggagcagctgttttgcaccagcgccgcctacctctccctccgcgtcggccagagcattcccagcaagcactgctctgatttgcatattgactcacggactttcctttactgctatacaaaaaacgacacaacagttctctttgtgaagagctttccctcagcccgagaagaatcgatagtttgccttttagcttcgacaatatacagttgaaagttggttagactttattttcacctttaccgtaagatgggtggaccgacaatgccactgtgcttccgaacgcgctcgagcaatgatagggacttagggtgatagaagtgcaaagcatgactgtcaaatttttggagcaggttttctgacttcggtcggaaaaccccttgtagttcctgcaatttaattttcgtttaaaactttattttattctttaacttaaaaaaaatatata

SEQ ID NO: 872 - DNA, 1087 bp, synthetic construct
  source 1..1087: mol_type = other DNA
gaagcagcgaggcccctacgagcctcgaggaaaagggaaagggccgctcaccgtcccttggccgccgtcccgcgcttccggatgagctcgtccagcgagagatcggccatcttgcggcgcgcagctagcggagaacggaggagaagccgactgcggcgagcccgccccgcggccggagtcaagagcggcttccggcaacccggacggccaactctcgcgacagctcaaacgaaaagctcgagacggaaggggtggagcctctctccccgtgagcctttgcggtgctcgcttctaatttgcatggaggagtccggagccttatgggctctctctcccccctcctccttttgctaatgaggaattagaattatatcgatcataaaccattaaaaagcattatcaagaggacaagtcttttagtcatacagccgatcggacactcaccatacttgtaatgagaatataatttcttacccctgaggaacgtagacacgttcctcaatgatagggacttagggtgatagaagtgcaaagcatgactgtcaaatttttggagcaggttttctgacttcggtcggaaaacccctactttctggagtttcaaaaacagactgtacgccaagggtcatatctttttttgtattggtttgtgtcttggttggtgtcttaggtgttaatcctacagtggagggtttatgggaataggaagtaacatgtcgcctgcatgtcataggagaaaaagcgagcatcagccgtatcggctttgtaacacaaattagctatcgtgaagtccgctcagctcttccctttctaccctggctgctttttgcagggattggtccgtggtctccagtctcttgggttctcaccctgtgtgaaaatcttcgtgtttttccctaccccccagtcacctcttacacagcctctgcttccaagcgcagcccccacaggagtttgtaggatttctgtgctagcggggaatgtgttctcacctcatagagccaggtagaaattatgcagatgggcagttctctgggaagaaagcagggcctttggggctctcagtgtccccgttgggttgtagaca

SEQ ID NO: 873 - DNA, 1087 bp, synthetic construct
  source 1..1087: mol_type = other DNA
gaagcagcgaggcccctacgagcctcgaggaaaagggaaagggccgctcaccgtcccttggccgccgtcccgcgcttccggatgagctcgtccagcgagagatcggccatcttgcggcgcgcagctagcggagaacggaggagaagccgactgcggcgagcccgccccgcggccggagtcaagagcggcttccggcaacccggacggccaactctcgcgacagctcaaacgaaaagctcgagacggaaggggtggagcctctctccccgtgagcctttgcggtgctcgcttctaatttgcatggaggagtccggagccttatgggctctctctcccccctcctccttttgctaatgaggaattagaattatatcgatcataaaccattaaaaagcattatcaagaggacaagtcttttagtcatacagccgatcggacactcaccatacttgtaatgagaatataatttcttacccctgaggaacgtagacacgttcctcaatgatagggacttagggtgatagaagtgcaaagcatgactgtcaaatttttggagcaggttttctgacttcggtcggaaaacccctactttctggagtttctaaaagtagactgtacgctaagggtcatatctttttttgttttggtttgtgtcttggttggcgtcttaaatgttaatcctacagtggagggctggcgaataggaagtaacatgtcgcctgcacgccataggagaaaaagcgagcatcagccgtatcggctttgtaacacaaattagctatcgtgaagtccgctcagctcttccctttctaccctggctgctttttgcagggattggtccgtggtctccagtctcttgggttctcaccctgtgtgaaaatcttcctgtttttccctaccccccaagtcacctcttacacagcctctgcttccaagcgcagcccccacaggagtttgtaggatttctgtgctagcggggagtgtgttctcacctcatagagccaggtagaaactacgcagatgggtgctgttctccaggaagaaagcagggcctttggggctctcagtgtccccgttgggttgtaga

SEQ ID NO: 874 - DNA, 1087 bp, synthetic construct
  source 1..1087: mol_type = other DNA
gaagcagcgaggcccctacgagcctcgaggaaaagggaaagggccgctcaccgtcccttggccgccgtcccgcgcttccggatgagctcgtccagcgagagatcggccatcttgcggcgcgcagctagcggagaacggaggagaagccgactgcggcgagcccgccccgcggccggagtcaagagcggcttccggcaacccggacggccaactctcgcgacagctcaaacgaaaagctcgagacggaaggggtggagcctctctccccgtgagcctttgcggtgctcgcttctaatttgcatggaggagtccggagccttatgggctctctctcccccctcctccttttgctaatgaggaattagaattatatcgatcataaaccattaaaaagcattatcaagaggacaagtcttttagtcatacagccgatcggacactcaccatacttgtaatgagaatataatttcttacccctgaggaacgtagacacgttcctcaatgatagggacttagggtgatagaagtgcaaagcatgactgtcaaatttttggagcaggttttctgacttcggtcggaaaacccctactttctggagtttcaaaaacagaccgtacgccaagggtcatgtcttttttcgtattggtttgtgtcttagttgttaatcctacagtggaggcctggggaataagaagtaacatgtggcctgcacgccataggagaaaaagcgagcatcagccgtatcggctttgtaacacaaattagctatcgtgaagtccgctcagctcttccatttctaccctggctgctttttgcagggattggtccgtggtctccagtctcttgggttctcaccctgtgtgaaaatcttcgtgtttttccctaccccccaagtcacctcttacacagcctctgcttccaagcgcagcccccacaggagtttgtaggatttctgtgctagcggggagtgtgttctcacctcatagagccaggtagaaattatgcagatgggcgctgttctctgggaagaaagcagggcctttggggctctcagtgtccccgttgggttgtagacataacactctta

SEQ ID NO: 875 - DNA, 891 bp, synthetic construct
  source 1..891: mol_type = other DNA
gaagcagcgaggcccctacgagcctcgaggaaaagggaaagggccgctcaccgtcccttggccgccgtcccgcgcttccggatgagctcgtccagcgagagatcggccatcttgcggcgcgcagctagcggagaacggaggagaagccgactgcggcgagcccgccccgcggccggagtcaagagcggcttccggcaacccggacggccaactctcgcgacagctcaaacgaaaagctcgagacggaaggggtggagcctctctccccgtgagcctttgcggtgctcgcttctaatttgcatggaggagtccggagccttatgggctctctctcccccctcctccttttgctaatgaggaattagaattatatcgatcataaaccattaaaaagcattatcaagaggacaagtcttttagtcatacagccgatcggacactcaccatacttgtaatgagaatataatttcttacccctgaggaacgtagacacgttcctcaatgatagggacttagggtgatagaagtgcaaagcatgactgtcaaatttttggagcaggttttctgacttcggtcggaaaacccctcctccggggatacaacgtgtttcctaaaagtagagggaggtaagagacggtagcacctgcggggcggcttgcacgccgagtgcctgtgacgcgccggcttaacttaactgcttccctgaagtaccttgaggttcctgatgtgcgggcggtagacggtaggcttatgcggcacgctgtcgtttccaccgtggctactgcgctttgggaaggccacgacctcctcctttggggaggtccttaggatctcagcttggcagtcgagtgggtggcgaccttttaaaggaatgggacccacccggagttc

SEQ ID NO: 876 - DNA, 1079 bp, synthetic construct
  source 1..1079: mol_type = other DNA
gaagcagcgaggcccctacgagcctcgaggaaaagggaaagggccgctcaccgtcccttggccgccgtcccgcgcttccggatgagctcgtccagcgagagatcggccatcttgcggcgcgcagctagcggagaacggaggagaagccgactgcggcgagcccgccccgcggccggagtcaagagcggcttccggcaacccggacggccaactctcgcgacagctcaaacgaaaagctcgagacggaaggggtggagcctctctccccgtgagcctttgcggtgctcgcttctaatttgcatggaggagtccggagccttatgggctctctctcccccctcctccttttgctaatgaggaattagaattatatcgatcataaaccattaaaaagcattatcaagaggacaagtcttttagtcatacagccgatcggacactcaccatacttgtaatgagaatataatttcttacccctgaggaacgtagacacgttcctcaatgatagggacttagggtgatagaagtgcaaagcatgactgtcaaatttttggagcaggttttctgacttcggtcggaaaacccctttcccttcttgtaatacaaaataataacaaccacagaggacatcgcaagtaaaatgtgtataacaaccccatctaaagaaccctatcatctttctactatctgtctacctaaatatgtatagtataaataaccctatatagcactctaagcaacttaagttaggtaacttagaaaactcttttttttttttgagactgagtctcactctgtcgcacccaggctggagtgcagtggcgtgatctcggctcactgcaacctccaccttctgggttcaagtgattctcccatctcagtctcccaagtagctgggattacaggcacgccaccatgccctgctacatttttttttttttagtagagatgaggtttcaccacattggccaggctgttctcgaactcctgacctcaggtgatccgcccaccttggcctcatgaagtgctgggattacaggtgtgagccactgtacccagccagaaaactcttaaaaaac

SEQ ID NO: 877 - DNA, 969 bp, synthetic construct
  source 1..969: mol_type = other DNA
gaagcagcgaggcccctacgagcctcgaggaaaagggaaagggccgctcaccgtcccttggccgccgtcccgcgcttccggatgagctcgtccagcgagagatcggccatcttgcggcgcgcagctagcggagaacggaggagaagccgactgcggcgagcccgccccgcggccggagtcaagagcggcttccggcaacccggacggccaactctcgcgacagctcaaacgaaaagctcgagacggaaggggtggagcctctctccccgtgagcctttgcggtgctcgcttctaatttgcatggaggagtccggagccttatgggctctctctcccccctcctccttttgctaatgaggaattagaattatatcgatcataaaccattaaaaagcattatcaagaggacaagtcttttagtcatacagccgatcggacactcaccatacttgtaatgagaatataatttcttacccctgaggaacgtagacacgttcctcaatgatagggacttagggtgatagaagtgcaaagcatgactgtcaaatttttggagcaggttttctgacttcggtcggaaaacccctctgaattttcttgcagttgaacaacagaggctttttttgtgtgtgtgggggtgcttggttttgggaggttgaagagtacttgttcgcaaactctctaaatgagagatggggaagtgtcttaccagctgattcgcgagagcacctgcaagtttacctgttttagtgatttgcgtttatgaaagttggagttgctgattttgtgatctctacttttaaggtaaaagcagggcggtgttgacttttcttgccagttggctgtcctgttttctttctcgcactgttttctttttgagacgaagtctgtcgctcaggctggagtgcactggcgtgatctcggctcgctgcaaactttgccgaacccctgtttagcgatttccgtttg

SEQ ID NO: 878 - DNA, 1087 bp, synthetic construct
  source 1..1087: mol_type = other DNA
gaagcagcgaggcccctacgagcctcgaggaaaagggaaagggccgctcaccgtcccttggccgccgtcccgcgcttccggatgagctcgtccagcgagagatcggccatcttgcggcgcgcagctagcggagaacggaggagaagccgactgcggcgagcccgccccgcggccggagtcaagagcggcttccggcaacccggacggccaactctcgcgacagctcaaacgaaaagctcgagacggaaggggtggagcctctctccccgtgagcctttgcggtgctcgcttctaatttgcatggaggagtccggagccttatgggctctctctcccccctcctccttttgctaatgaggaattagaattatatcgatcataaaccattaaaaagcattatcaagaggacaagtcttttagtcatacagccgatcggacactcaccatacttgtaatgagaatataatttcttacccctgaggaacgtagacacgttcctcaatgatagggacttagggtgatagaagtgcaaagcatgactgtcaaatttttggagcaggttttctgacttcggtcggaaaacccctatatgtggtaatccaacaatagaaattatttttaagtttgtgtgttcctttttctgttcaatggtgcttttgatattgttgtaaagcagtgactagcagattctgtgtggtaaaagcactgaaccctgtttagttcttttctccctaccttattggtaattatttctgtgtatatatgttccaaagaaatgcggcttgtatattcatgcttttcaactttttgtgatagacagttgatacacaagtagtacctcctccgggatcttcttagtcaagactgtttggtagatgcatgttttttgttacttgtaatgtacagtattcagttcattttctttttgcagcactgtccggttgaaacacaacgcgaggatcgggcgtggtggctcacgcctgtaatcccagcactttgggaggccgaggcaggacaatcaagaccaatcctggtcatcaaggcaggagaatcaagaccatcgaggtcaggagatcaagaccatcct

SEQ ID NO: 879 - DNA, 1085 bp, synthetic construct
  source 1..1085: mol_type = other DNA
gaagcagcgaggcccctacgagcctcgaggaaaagggaaagggccgctcaccgtcccttggccgccgtcccgcgcttccggatgagctcgtccagcgagagatcggccatcttgcggcgcgcagctagcggagaacggaggagaagccgactgcggcgagcccgccccgcggccggagtcaagagcggcttccggcaacccggacggccaactctcgcgacagctcaaacgaaaagctcgagacggaaggggtggagcctctctccccgtgagcctttgcggtgctcgcttctaatttgcatggaggagtccggagccttatgggctctctctcccccctcctccttttgctaatgaggaattagaattatatcgatcataaaccattaaaaagcattatcaagaggacaagtcttttagtcatacagccgatcggacactcaccatacttgtaatgagaatataatttcttacccctgaggaacgtagacacgttcctcaatgatagggacttagggtgatagaagtgcaaagcatgactgtcaaatttttggagcaggttttctgacttcggtcggaaaacccctacatcaggttgtttttctgtttttacatcaggttgtttttctgtttggttttttttttacaccacgtttatacgccggtgcacggtttaccactgaaaacacctttcatctacaggtgatatcttttaacacaaataaaatgtagtagtcctaggagacggaatagaaggaggtggggcctaggcagattcatctctgcggtgcattttgcctctggccctcgggccctagtttgcgatctttcccatcttgcctctgcttccctctgcacaatcctgagtattgcagtaccttacacttaaggaaatttcgtcttgccaaagttgatccatttcagctccgaaacataacaggaactagtgcaacgataaacgtatgaggaacttgcaataagagtgacagaatcctttgaatcaaaaaaaaaaaaagccaccacttaatgagtatctaccatatgtcaagggcttcaccaatatttcattgaaatattccagacca

SEQ ID NO: 880 - DNA, 1087 bp, synthetic construct
  source 1..1087: mol_type = other DNA
gaagcagcgaggcccctacgagcctcgaggaaaagggaaagggccgctcaccgtcccttggccgccgtcccgcgcttccggatgagctcgtccagcgagagatcggccatcttgcggcgcgcagctagcggagaacggaggagaagccgactgcggcgagcccgccccgcggccggagtcaagagcggcttccggcaacccggacggccaactctcgcgacagctcaaacgaaaagctcgagacggaaggggtggagcctctctccccgtgagcctttgcggtgctcgcttctaatttgcatggaggagtccggagccttatgggctctctctcccccctcctccttttgctaatgaggaattagaattatatcgatcataaaccattaaaaagcattatcaagaggacaagtcttttagtcatacagccgatcggacactcaccatacttgtaatgagaatataatttcttacccctgaggaacgtagacacgttcctcaatgatagggacttagggtgatagaagtgcaaagcatgactgtcaaatttttggagcaggttttctgacttcggtcggaaaacccctcttatgatgtttgttgccaatgatagattgttttcactgtgcaaaaattatgggtagttttggtggtcttgatgcagttgtaagcttggggtatgaaggtttgggccacgcctgggcgcttccggctgcgccggatgctgtttcctttccgctcccaggggcgttgggaacggttgtaggacgtggctctttattcgtgagttttccatttacctccgctgaacctagagcttcagacgccctatggcgtccgcctcgacccaaccggcggccttgagcgctgagcaagcaaagggtgagaatcgtcctagtcaaggcataggctgctggcctggggtagtcaaggcatgggctgctggtctggggaggatgcgggcggaggatgtggggcgacaaacctggctacgtccgccgggaaaatggggtaggggacgccgggtaccgtccttctaagtggggcgcttgcccccaagacttgggatcttattgggttacctaca

SEQ ID NO: 881 - DNA, 1085 bp, synthetic construct
  source 1..1085: mol_type = other DNA
gaagcagcgaggcccctacgagcctcgaggaaaagggaaagggccgctcaccgtcccttggccgccgtcccgcgcttccggatgagctcgtccagcgagagatcggccatcttgcggcgcgcagctagcggagaacggaggagaagccgactgcggcgagcccgccccgcggccggagtcaagagcggcttccggcaacccggacggccaactctcgcgacagctcaaacgaaaagctcgagacggaaggggtggagcctctctccccgtgagcctttgcggtgctcgcttctaatttgcatggaggagtccggagccttatgggctctctctcccccctcctccttttgctaatgaggaattagaattatatcgatcataaaccattaaaaagcattatcaagaggacaagtcttttagtcatacagccgatcggacactcaccatacttgtaatgagaatataatttcttacccctgaggaacgtagacacgttcctcaatgatagggacttagggtgatagaagtgcaaagcatgactgtcaaatttttggagcaggttttctgacttcggtcggaaaaccccttctttactgttatatgttaggcgaaatattacgcgtttggagtaagtggtgctttttgtaactgaaaagagattctgtgtgtgtttttttttttttagaggctgcatagttatttgtatgaaccgcaggtgacctaattagcaaggtaattcagacctgtatcctagcacttaagaagtggaagtgggataaccctgcgtgttctcgtgtgggaggctagcttaagcaacaaagcaggaaggccccaccaacaaaagaatttaaaaattatacgtgcgtggtggcgcgcgtatgaggaaattatttggcaactgtgttacagtatagcagcaaatggaatagacctagtccctgactttaggagacctgcctcagccccccgaatggctgggactacaggcgtgcgcctccgcgcccagctaatttttgcatttttggtagagacgggttcaccatgttggccaggatggtctccatctcttcatctggtgatccgcc

SEQ ID NO: 882 - DNA, 1087 bp, synthetic construct
  source 1..1087: mol_type = other DNA
gaagcagcgaggcccctacgagcctcgaggaaaagggaaagggccgctcaccgtcccttggccgccgtcccgcgcttccggatgagctcgtccagcgagagatcggccatcttgcggcgcgcagctagcggagaacggaggagaagccgactgcggcgagcccgccccgcggccggagtcaagagcggcttccggcaacccggacggccaactctcgcgacagctcaaacgaaaagctcgagacggaaggggtggagcctctctccccgtgagcctttgcggtgctcgcttctaatttgcatggaggagtccggagccttatgggctctctctcccccctcctccttttgctaatgaggaattagaattatatcgatcataaaccattaaaaagcattatcaagaggacaagtcttttagtcatacagccgatcggacactcaccatacttgtaatgagaatataatttcttacccctgaggaacgtagacacgttcctcaatgatagggacttagggtgatagaagtgcaaagcatgactgtcaaatttttggagcaggttttctgacttcggtcggaaaacccctaccttattcacgcctaaaaagtagactgactgtggggtggtcgtgttttttgtttcttgttggtaggtggtgaatgcgtttttttcgttgttttctccgttactcaggctgccagttgcttggcagtcttgtcgctggctgtggacgctctgcacttcatcaccgtccccagctgcgctttgagccggtctaaggttgcccacagtattgacgttgggacccacgaaactggcaatttccatgtgtgcggccttacccagttctcccaaacttctgcgtataaccgcttctctgtgcttcagaaagataagtccggccccggcctcacacagcagctcagttcgtgacagcgtttaatatgtaaaatggagcaaataatttatagggcgttgggagagttaaagagactaattcatttacgtgttaaatacagggaatggcttttgcattgatataaccccagcctccagcatgcgccagacctgacgtaggtgttcggc

SEQ ID NO: 883 - DNA, 1087 bp, synthetic construct
  source 1..1087: mol_type = other DNA
gaagcagcgaggcccctacgagcctcgaggaaaagggaaagggccgctcaccgtcccttggccgccgtcccgcgcttccggatgagctcgtccagcgagagatcggccatcttgcggcgcgcagctagcggagaacggaggagaagccgactgcggcgagcccgccccgcggccggagtcaagagcggcttccggcaacccggacggccaactctcgcgacagctcaaacgaaaagctcgagacggaaggggtggagcctctctccccgtgagcctttgcggtgctcgcttctaatttgcatggaggagtccggagccttatgggctctctctcccccctcctccttttgctaatgaggaattagaattatatcgatcataaaccattaaaaagcattatcaagaggacaagtcttttagtcatacagccgatcggacactcaccatacttgtaatgagaatataatttcttacccctgaggaacgtagacacgttcctcaatgatagggacttagggtgatagaagtgcaaagcatgactgtcaaatttttggagcaggttttctgacttcggtcggaaaaccccttttgacccattacccatctaagttagatgcttttttaaatgttttttaatttttaaatttttaatttttttcattatttattttttatttttgagacggatctcggctcactgtaacctccacctcccgggttcaagcgattctcctgactcagcctcccgagtagctgggattacaggcgcgcgccaccatgcccggctaatttttctatttttagtaaagacggggtttcgccatgttgaccagggtggtcttgaactcctgacgtcaggtgatcctcctgcctcgtgctgggattgcaggcgtgagccaccgctcccggcccttagatgctttttaatcagcaagtacgcaatgctttcctgacaggaatgtcaagtccgtcaggaaatccacataagggtgttaagcaggcaaagtaccacatacagattaaaatcaaaagcactgtcaacgcttatttaatttatacagtagaccctaacttttctaattttgtg

SEQ ID NO: 884 - DNA, 1087 bp, synthetic construct
  source 1..1087: mol_type = other DNA
gaagcagcgaggcccctacgagcctcgaggaaaagggaaagggccgctcaccgtcccttggccgccgtcccgcgcttccggatgagctcgtccagcgagagatcggccatcttgcggcgcgcagctagcggagaacggaggagaagccgactgcggcgagcccgccccgcggccggagtcaagagcggcttccggcaacccggacggccaactctcgcgacagctcaaacgaaaagctcgagacggaaggggtggagcctctctccccgtgagcctttgcggtgctcgcttctaatttgcatggaggagtccggagccttatgggctctctctcccccctcctccttttgctaatgaggaattagaattatatcgatcataaaccattaaaaagcattatcaagaggacaagtcttttagtcatacagccgatcggacactcaccatacttgtaatgagaatataatttcttacccctgaggaacgtagacacgttcctcaatgatagggacttagggtgatagaagtgcaaagcatgactgtcaaatttttggagcaggttttctgacttcggtcggaaaacccctgtttacttggttttaaaaatagcttgcactagcgataccgcgaatatggttattaggtttgttaggcacagtcgtgtcttactatagaaaaataacgtagtgttcattttgctgcctgtatgtgttaatttgtccttattgcgccattgttcttgttaagtcttctgtaaggagttgcgggtttcaaactgtcagtctgagagcataagctcacttttcagtcagttgaattgaatgttacattcgattggttctggatattgatattacccaaggcttgtcctgtttgtaagtcttttcctacacctgacaatatgattatgtttacaatgtccctagaactctgggtgtatcgttcccactgaataaaatttgatctctaagttgacctataaatttaagtaccaaaaaactggtttgtaagattttggaaggcagaggcagggaagagaccaacgtggtctacatataaagtaccaggtacatataaagtaccaggt

SEQ ID NO: 885 - DNA, 1083 bp, synthetic construct
  source 1..1083: mol_type = other DNA
gaagcagcgaggcccctacgagcctcgaggaaaagggaaagggccgctcaccgtcccttggccgccgtcccgcgcttccggatgagctcgtccagcgagagatcggccatcttgcggcgcgcagctagcggagaacggaggagaagccgactgcggcgagcccgccccgcggccggagtcaagagcggcttccggcaacccggacggccaactctcgcgacagctcaaacgaaaagctcgagacggaaggggtggagcctctctccccgtgagcctttgcggtgctcgcttctaatttgcatggaggagtccggagccttatgggctctctctcccccctcctccttttgctaatgaggaattagaattatatcgatcataaaccattaaaaagcattatcaagaggacaagtcttttagtcatacagccgatcggacactcaccatacttgtaatgagaatataatttcttacccctgaggaacgtagacacgttcctcaatgatagggacttagggtgatagaagtgcaaagcatgactgtcaaatttttggagcaggttttctgacttcggtcggaaaacccctatttttgtggtgctaaaagttagattgcattccgcccttctcacgtctctttacgtgttgtttgcgaggcgtggcctcggaggtaaatggtctccttttacctcagataagcttacctttgctctgtgagtaagaatgtagctacacttccaaatttagctattgtcctttgcggtccaaatgaaaatattaccttccgatctaacaatgttaaactagtcccaggcccttctatcgattgccagaatagactagactactacacagacacaccctctcaaatcaggccagctcctgcaacctgcacctacagtttgtcccctgggacaaatgaaaggacaggccctctttcccccccccccccaaatcagagcacacacagatcttggggtctggggcagaaatttcgttcatggaaaaaacaaacaaacaaacaaacacgatcaaaggaagctcgttccctttggcctcagggtttcttagacgccgtgttccc

SEQ ID NO: 886 - DNA, 1084 bp, synthetic construct
  source 1..1084: mol_type = other DNA
gaagcagcgaggcccctacgagcctcgaggaaaagggaaagggccgctcaccgtcccttggccgccgtcccgcgcttccggatgagctcgtccagcgagagatcggccatcttgcggcgcgcagctagcggagaacggaggagaagccgactgcggcgagcccgccccgcggccggagtcaagagcggcttccggcaacccggacggccaactctcgcgacagctcaaacgaaaagctcgagacggaaggggtggagcctctctccccgtgagcctttgcggtgctcgcttctaatttgcatggaggagtccggagccttatgggctctctctcccccctcctccttttgctaatgaggaattagaattatatcgatcataaaccattaaaaagcattatcaagaggacaagtcttttagtcatacagccgatcggacactcaccatacttgtaatgagaatataatttcttacccctgaggaacgtagacacgttcctcaatgatagggacttagggtgatagaagtgcaaagcatgactgtcaaatttttggagcaggttttctgacttcggtcggaaaacccctataactggtaaccaaaagcagattactttcccccttgtggtcttcgcgtttgcggacgggagagaactttcggccattttccttttagaaatttaacttcttgaaggccaccaggtgacccttacttccctctcacctttccttctacctgtactttctctattaaaaagcctgcagaagtacccttgacaaattgccaaaaatgacacctaaaaaaaaaaaaaggaaaaacgacaccttaggtaattataggttgtaagaaaaagatttgacctcttggagtttttatttcttaataccaaaggacacccaaggaacgtatctctcaaaattgggtttcaaacctcagccgtttccttcttagttccagtgcttaacacgcaacagacctgcacaccactacactgcatacgagttttaaagttaataaatcagtcacccctccatagtcttctacctacttgaagacagaaacggctgctaggaagcaattcttc

SEQ ID NO: 887 - DNA, 1087 bp, synthetic construct
  source 1..1087: mol_type = other DNA
gaagcagcgaggcccctacgagcctcgaggaaaagggaaagggccgctcaccgtcccttggccgccgtcccgcgcttccggatgagctcgtccagcgagagatcggccatcttgcggcgcgcagctagcggagaacggaggagaagccgactgcggcgagcccgccccgcggccggagtcaagagcggcttccggcaacccggacggccaactctcgcgacagctcaaacgaaaagctcgagacggaaggggtggagcctctctccccgtgagcctttgcggtgctcgcttctaatttgcatggaggagtccggagccttatgggctctctctcccccctcctccttttgctaatgaggaattagaattatatcgatcataaaccattaaaaagcattatcaagaggacaagtcttttagtcatacagccgatcggacactcaccatacttgtaatgagaatataatttcttacccctgaggaacgtagacacgttcctcaatgatagggacttagggtgatagaagtgcaaagcatgactgtcaaatttttggagcaggttttctgacttcggtcggaaaacccctctggggaataagagtggtttaaagaaagaacaatttgagagatctgcttagatctaataaaacccaagtatagtttctttagacgtcttatatctcacgtaggacctcttatttcagactcactgcaagaacaagctaaagaactatatacagtcaggaacaaggtgagccatcgcggttctcagtcccatgatcttaagagtttttcctcttcccctcttccctggctgtcctggagctcactctgtagaccaggctggtctcaaactcagaaatccacttacctctgcctcccaagggctgggattaaaggcatgcaccaccattgcccggcagggtatgtggactatgctgtccttcaactcagagatcgtggtactttaaatctcattttccgaaagaaaagaaaagaaaggaaggggggaaataaagccagtatattttgcacccacaatctgaagttctacaaatattgttagaaaatgcaaaggacccaagtc

SEQ ID NO: 888 - DNA, 1087 bp, synthetic construct
  source 1..1087: mol_type = other DNA
gaagcagcgaggcccctacgagcctcgaggaaaagggaaagggccgctcaccgtcccttggccgccgtcccgcgcttccggatgagctcgtccagcgagagatcggccatcttgcggcgcgcagctagcggagaacggaggagaagccgactgcggcgagcccgccccgcggccggagtcaagagcggcttccggcaacccggacggccaactctcgcgacagctcaaacgaaaagctcgagacggaaggggtggagcctctctccccgtgagcctttgcggtgctcgcttctaatttgcatggaggagtccggagccttatgggctctctctcccccctcctccttttgctaatgaggaattagaattatatcgatcataaaccattaaaaagcattatcaagaggacaagtcttttagtcatacagccgatcggacactcaccatacttgtaatgagaatataatttcttacccctgaggaacgtagacacgttcctcaatgatagggacttagggtgatagaagtgcaaagcatgactgtcaaatttttggagcaggttttctgacttcggtcggaaaacccctctcggtttatcttaaagggttttaaatatagaaagcttccttagtcttatgggtgagagtgctgtttaagccttacctaggtatgtctttgaacatttattacagattgttatttgtgactatgaccactcaggtgttctgttcttgtgaatttagacacactcagaaaggctacacactcaaagaccacaccaaagtgaagtactatctgggccgtgaaactggtcacatatcagttattttgcagtaaaacaaggaagtcaatcatactgcttcagtgggtcagggagtcaagaatgcacagtacaagagctggtgagattcctcagcaggtaagagcactgaatgctcttccaaagattctgagttcaaatcccagcaaccacgtggtggatttgaacaaaggatgaaaacaaccatccataaccagatctgatgccctcttctggagtgtcaaaagacagctatggtgtacttacataaataaataagtaaaaaca

SEQ ID NO: 889 - DNA, 1087 bp, synthetic construct
  source 1..1087: mol_type = other DNA
gaagcagcgaggcccctacgagcctcgaggaaaagggaaagggccgctcaccgtcccttggccgccgtcccgcgcttccggatgagctcgtccagcgagagatcggccatcttgcggcgcgcagctagcggagaacggaggagaagccgactgcggcgagcccgccccgcggccggagtcaagagcggcttccggcaacccggacggccaactctcgcgacagctcaaacgaaaagctcgagacggaaggggtggagcctctctccccgtgagcctttgcggtgctcgcttctaatttgcatggaggagtccggagccttatgggctctctctcccccctcctccttttgctaatgaggaattagaattatatcgatcataaaccattaaaaagcattatcaagaggacaagtcttttagtcatacagccgatcggacactcaccatacttgtaatgagaatataatttcttacccctgaggaacgtagacacgttcctcaatgatagggacttagggtgatagaagtgcaaagcatgactgtcaaatttttggagcaggttttctgacttcggtcggaaaacccctccacattttgtgtttaaaaatagaaatatttaagtgagatcagtttaaatctgctttatctagggtgtctaactgcttgcatctttttaacttttccttatttgtgagaaggtctgtaaaacttattatatgttagtacactgtagctgtcttcagacactccagaagagggattcagatcaccttacagatggttttgagccaccatgtggttgctgggatttgaactcaggacctttagaaaagtagttgggtgctcttacccgctgagccatctcaccagccctttttttttcttttttccagttcgggtttctctgtgtgtagccctggctgtcctggaactcattctgtagaccgggctggcctcgaactcagaaatctgcctgcctctgcctcccaagtgctgggattaaaggaatgtgccttcattgcccggctctagggctttttgttgttgtttgtttgtttgtttgtttgtttgcttttgtggatggcct

SEQ ID NO: 890 - DNA, 1087 bp, synthetic construct
  source 1..1087: mol_type = other DNA
gaagcagcgaggcccctacgagcctcgaggaaaagggaaagggccgctcaccgtcccttggccgccgtcccgcgcttccggatgagctcgtccagcgagagatcggccatcttgcggcgcgcagctagcggagaacggaggagaagccgactgcggcgagcccgccccgcggccggagtcaagagcggcttccggcaacccggacggccaactctcgcgacagctcaaacgaaaagctcgagacggaaggggtggagcctctctccccgtgagcctttgcggtgctcgcttctaatttgcatggaggagtccggagccttatgggctctctctcccccctcctccttttgctaatgaggaattagaattatatcgatcataaaccattaaaaagcattatcaagaggacaagtcttttagtcatacagccgatcggacactcaccatacttgtaatgagaatataatttcttacccctgaggaacgtagacacgttcctcaatgatagggacttagggtgatagaagtgcaaagcatgactgtcaaatttttggagcaggttttctgacttcggtcggaaaacccctaaaaccagtaagggagaaaggtcaagtaacatataaaggaaggcctatcagaattacaccagacttttcaccagagactatgaaagccagaagagcctggacagatgttatacagacactaagagaacacaaatgccagcccaggctactatacctggccaaactctcaattaccatagatggagaaaccaaagtattccacgacaaaaacaaattcacacaatatctttccacgaatccagcccttcaaaggataatgacagaaaagaagcaatacaaggacggaaatcacgccctagaacaaccaagaaactaatcattcaacaaaccaaaaagaagacagccacaagaacagaatgccaactctaacaacaaaaataaaaggaagcaacaattacttttccttaatatctcttaatatcaatggactcaattccccaataaaaagacatagactaacagactggctacacaaacaggacccaacattctgctgctta

SEQ ID NO: 891 - DNA, 1087 bp, synthetic construct
  source 1..1087: mol_type = other DNA
gaagcagcgaggcccctacgagcctcgaggaaaagggaaagggccgctcaccgtcccttggccgccgtcccgcgcttccggatgagctcgtccagcgagagatcggccatcttgcggcgcgcagctagcggagaacggaggagaagccgactgcggcgagcccgccccgcggccggagtcaagagcggcttccggcaacccggacggccaactctcgcgacagctcaaacgaaaagctcgagacggaaggggtggagcctctctccccgtgagcctttgcggtgctcgcttctaatttgcatggaggagtccggagccttatgggctctctctcccccctcctccttttgctaatgaggaattagaattatatcgatcataaaccattaaaaagcattatcaagaggacaagtcttttagtcatacagccgatcggacactcaccatacttgtaatgagaatataatttcttacccctgaggaacgtagacacgttcctcaatgatagggacttagggtgatagaagtgcaaagcatgactgtcaaatttttggagcaggttttctgacttcggtcggaaaacccctcccaatttcactggtctacaatgaaagcaaaacagttctcttccccgctccccggtgtgtgagaggggctttgatccttctctggtttcctaggaaacgcgtatgtgctagagccacgctctgagacttccgcctcgtgcggtcccgcttcctttctgcctcctctggcctgcatccgtgggggaggtggctggctgcagggttctccggatctcttctgtgttcccactactcaagcaccgagtggcgttctatggcgtccgcctcggctcagcccgcggccctgagcgcggagcaggccaagggtgaggaaagagcctagtctgggtgtgggccgtcttctggggggagggcgcgatactattctttgcctctccaagtggggcccttgcccattagggcgaagggttgggaggacaagcttatcgggttgcttgcaggcctcggcccactaattccctgcctcttccctcctctgggctcgcccgccgtcctccgcg

SEQ ID NO: 892 - DNA, 1087 bp, synthetic construct
  source 1..1087: mol_type = other DNA
gaagcagcgaggcccctacgagcctcgaggaaaagggaaagggccgctcaccgtcccttggccgccgtcccgcgcttccggatgagctcgtccagcgagagatcggccatcttgcggcgcgcagctagcggagaacggaggagaagccgactgcggcgagcccgccccgcggccggagtcaagagcggcttccggcaacccggacggccaactctcgcgacagctcaaacgaaaagctcgagacggaaggggtggagcctctctccccgtgagcctttgcggtgctcgcttctaatttgcatggaggagtccggagccttatgggctctctctcccccctcctccttttgctaatgaggaattagaattatatcgatcataaaccattaaaaagcattatcaagaggacaagtcttttagtcatacagccgatcggacactcaccatacttgtaatgagaatataatttcttacccctgaggaacgtagacacgttcctcaatgatagggacttagggtgatagaagtgcaaagcatgactgtcaaatttttggagcaggttttctgacttcggtcggaaaacccctgaatttgttaaattacaggaggaagcttttttagttcattttacaaatactttcttgttaggtagataataccttctaaggttattatctggatcttctaagtctttttatcgctagcaagtctaagtttctggactttggaattagaagttaatgtcgtaggcgggcatggtggtccacgcctttaatcccagagtttgggaggcagacgcaggtggttttctgagttcgaggccatcctgctcttcaatgttagttccaggacagccagggttatacaaagaaaccctgtctcgagaaacaaaacaaacaaaaaaagagtagctgagtgctctgagttgtctctccagccccttagctatttattttcatttaaattatttttgttttattcgcttgtgtgcctgagtttgaatttcccgggattaacagttgaagactagggctggtgagatggctcagcggttaagattgccgactgctcttccaaaggtcctgag

SEQ ID NO: 893 - DNA, 1087 bp, synthetic construct
  source 1..1087: mol_type = other DNA
gaagcagcgaggcccctacgagcctcgaggaaaagggaaagggccgctcaccgtcccttggccgccgtcccgcgcttccggatgagctcgtccagcgagagatcggccatcttgcggcgcgcagctagcggagaacggaggagaagccgactgcggcgagcccgccccgcggccggagtcaagagcggcttccggcaacccggacggccaactctcgcgacagctcaaacgaaaagctcgagacggaaggggtggagcctctctccccgtgagcctttgcggtgctcgcttctaatttgcatggaggagtccggagccttatgggctctctctcccccctcctccttttgctaatgaggaattagaattatatcgatcataaaccattaaaaagcattatcaagaggacaagtcttttagtcatacagccgatcggacactcaccatacttgtaatgagaatataatttcttacccctgaggaacgtagacacgttcctcaatgatagggacttagggtgatagaagtgcaaagcatgactgtcaaatttttggagcaggttttctgacttcggtcggaaaacccctaccccctaattctacaagaatagaaagcttagcagctcctctgaatggttgctctcaggtgctagtggttgcaagtcgtatgttgatgcctgcctttgccctacctggtgtgtgagcgtgagcgcgccccacctctccagcctctctcttactgtttttcagacaagatgggactgttgttctcctactgctatgtacctcaatttcaattgatcatgcctggacataactgcccatgttgtaaggtcgtctacgttgtaaggtcgtgctcagtttctgatgcctagactagtcacctttccgtttgcctcctgactgtgtaaatgaggcaaatgaaggtggtctcttaactgacatgttagtgtttgacctatgggatagtttctcattgttgagacagaatttctagaagctggtccgctgagcggctaagagcacttgctgatattgcaaaggatctacctgggtttggttctcagcactcacatggaagttcacat

SEQ ID NO: 894 - DNA, 654 bp, synthetic construct
  source 1..654: mol_type = other DNA
gaagcagcgaggcccctacgagcctcgaggaaaagggaaagggccgctcaccgtcccttggccgccgtcccgcgcttccggatgagctcgtccagcgagagatcggccatcttgcggcgcgcagctagcggagaacggaggagaagccgactgcggcgagcccgccccgcggccggagtcaagagcggcttccggcaacccggacggccaactctcgcgacagctcaaacgaaaagctcgagacggaaggggtggagcctctctccccgtgagcctttgcggtgctcgcttctaatttgcatggaggagtccggagccttatgggctctctctcccccctcctccttttgctaatgaggaattagaattatatcgatcataaaccattaaaaagcattatcaagaggacaagtcttttagtcatacagccgatcggacactcaccatacttgtaatgagaatataatttcttacccctgaggaacgtagacacgttcctcaatgatagggacttagggtgatagaagtgcaaagcatgactgtcaaatttttggagcaggttttctgacttcggtcggaaaaccccttgtagttcctgcaatttaattttcgtttaaaactttattttattctttaacttaaaaaaaatatata

SEQ ID NO: 895 - DNA, 1087 bp, synthetic construct
  source 1..1087: mol_type = other DNA
cgcttcggtgtgtcacttcggccacagagggagacagacgattacggcccacggaaggccgcgtgagtctcgtgaagctggagatgcgctgggtctacctttcgccgtccgctccgccttggcagaggcgccgacacgcaccgaaggcagagaacccatctcgtatgggaccgcaccggacacgggcgcctgggccaggagcagagccgggccgtagaatagacatggccgtcgggggcggggcttcggaaggtttaaccaatccaaactgttgtattttgcatagccccaaagcattttggttaacagtaaaaacatcctaaatttaagtattttaatttaaacttagaacgaagcgagtataaaaaggattatttaaccctaaaacggattcaggatttgttataatatcaagtacagtcggctacataaggtcaccacatgtgtaaagttacaaaattctatggccttatatacctaccaagagcctgcttactctcaatgatagggacttagggtgatagaagtgcaaagcatgactgtcaaatttttggagcaggttttctgacttcggtcggaaaacccctactttctggagtttcaaaaacagactgtacgccaagggtcatatctttttttgtattggtttgtgtcttggttggtgtcttaggtgttaatcctacagtggagggtttatgggaataggaagtaacatgtcgcctgcatgtcataggagaaaaagcgagcatcagccgtatcggctttgtaacacaaattagctatcgtgaagtccgctcagctcttccctttctaccctggctgctttttgcagggattggtccgtggtctccagtctcttgggttctcaccctgtgtgaaaatcttcgtgtttttccctaccccccagtcacctcttacacagcctctgcttccaagcgcagcccccacaggagtttgtaggatttctgtgctagcggggaatgtgttctcacctcatagagccaggtagaaattatgcagatgggcagttctctgggaagaaagcagggcctttggggctctcagtgtccccgttgggttgtagaca

SEQ ID NO: 896 - DNA, 1087 bp, synthetic construct
  source 1..1087: mol_type = other DNA
cgcttcggtgtgtcacttcggccacagagggagacagacgattacggcccacggaaggccgcgtgagtctcgtgaagctggagatgcgctgggtctacctttcgccgtccgctccgccttggcagaggcgccgacacgcaccgaaggcagagaacccatctcgtatgggaccgcaccggacacgggcgcctgggccaggagcagagccgggccgtagaatagacatggccgtcgggggcggggcttcggaaggtttaaccaatccaaactgttgtattttgcatagccccaaagcattttggttaacagtaaaaacatcctaaatttaagtattttaatttaaacttagaacgaagcgagtataaaaaggattatttaaccctaaaacggattcaggatttgttataatatcaagtacagtcggctacataaggtcaccacatgtgtaaagttacaaaattctatggccttatatacctaccaagagcctgcttactctcaatgatagggacttagggtgatagaagtgcaaagcatgactgtcaaatttttggagcaggttttctgacttcggtcggaaaacccctactttctggagtttctaaaagtagactgtacgctaagggtcatatctttttttgttttggtttgtgtcttggttggcgtcttaaatgttaatcctacagtggagggctggcgaataggaagtaacatgtcgcctgcacgccataggagaaaaagcgagcatcagccgtatcggctttgtaacacaaattagctatcgtgaagtccgctcagctcttccctttctaccctggctgctttttgcagggattggtccgtggtctccagtctcttgggttctcaccctgtgtgaaaatcttcctgtttttccctaccccccaagtcacctcttacacagcctctgcttccaagcgcagcccccacaggagtttgtaggatttctgtgctagcggggagtgtgttctcacctcatagagccaggtagaaactacgcagatgggtgctgttctccaggaagaaagcagggcctttggggctctcagtgtccccgttgggttgtaga

SEQ ID NO: 897 - DNA, 1087 bp, synthetic construct
  source 1..1087: mol_type = other DNA
cgcttcggtgtgtcacttcggccacagagggagacagacgattacggcccacggaaggccgcgtgagtctcgtgaagctggagatgcgctgggtctacctttcgccgtccgctccgccttggcagaggcgccgacacgcaccgaaggcagagaacccatctcgtatgggaccgcaccggacacgggcgcctgggccaggagcagagccgggccgtagaatagacatggccgtcgggggcggggcttcggaaggtttaaccaatccaaactgttgtattttgcatagccccaaagcattttggttaacagtaaaaacatcctaaatttaagtattttaatttaaacttagaacgaagcgagtataaaaaggattatttaaccctaaaacggattcaggatttgttataatatcaagtacagtcggctacataaggtcaccacatgtgtaaagttacaaaattctatggccttatatacctaccaagagcctgcttactctcaatgatagggacttagggtgatagaagtgcaaagcatgactgtcaaatttttggagcaggttttctgacttcggtcggaaaacccctactttctggagtttcaaaaacagaccgtacgccaagggtcatgtcttttttcgtattggtttgtgtcttagttgttaatcctacagtggaggcctggggaataagaagtaacatgtggcctgcacgccataggagaaaaagcgagcatcagccgtatcggctttgtaacacaaattagctatcgtgaagtccgctcagctcttccatttctaccctggctgctttttgcagggattggtccgtggtctccagtctcttgggttctcaccctgtgtgaaaatcttcgtgtttttccctaccccccaagtcacctcttacacagcctctgcttccaagcgcagcccccacaggagtttgtaggatttctgtgctagcggggagtgtgttctcacctcatagagccaggtagaaattatgcagatgggcgctgttctctgggaagaaagcagggcctttggggctctcagtgtccccgttgggttgtagacataacactctta

SEQ ID NO: 898 - DNA, 891 bp, synthetic construct
  source 1..891: mol_type = other DNA
cgcttcggtgtgtcacttcggccacagagggagacagacgattacggcccacggaaggccgcgtgagtctcgtgaagctggagatgcgctgggtctacctttcgccgtccgctccgccttggcagaggcgccgacacgcaccgaaggcagagaacccatctcgtatgggaccgcaccggacacgggcgcctgggccaggagcagagccgggccgtagaatagacatggccgtcgggggcggggcttcggaaggtttaaccaatccaaactgttgtattttgcatagccccaaagcattttggttaacagtaaaaacatcctaaatttaagtattttaatttaaacttagaacgaagcgagtataaaaaggattatttaaccctaaaacggattcaggatttgttataatatcaagtacagtcggctacataaggtcaccacatgtgtaaagttacaaaattctatggccttatatacctaccaagagcctgcttactctcaatgatagggacttagggtgatagaagtgcaaagcatgactgtcaaatttttggagcaggttttctgacttcggtcggaaaacccctcctccggggatacaacgtgtttcctaaaagtagagggaggtaagagacggtagcacctgcggggcggcttgcacgccgagtgcctgtgacgcgccggcttaacttaactgcttccctgaagtaccttgaggttcctgatgtgcgggcggtagacggtaggcttatgcggcacgctgtcgtttccaccgtggctactgcgctttgggaaggccacgacctcctcctttggggaggtccttaggatctcagcttggcagtcgagtgggtggcgaccttttaaaggaatgggacccacccggagttc

SEQ ID NO: 899 - DNA, 1079 bp, synthetic construct
  source 1..1079: mol_type = other DNA
cgcttcggtgtgtcacttcggccacagagggagacagacgattacggcccacggaaggccgcgtgagtctcgtgaagctggagatgcgctgggtctacctttcgccgtccgctccgccttggcagaggcgccgacacgcaccgaaggcagagaacccatctcgtatgggaccgcaccggacacgggcgcctgggccaggagcagagccgggccgtagaatagacatggccgtcgggggcggggcttcggaaggtttaaccaatccaaactgttgtattttgcatagccccaaagcattttggttaacagtaaaaacatcctaaatttaagtattttaatttaaacttagaacgaagcgagtataaaaaggattatttaaccctaaaacggattcaggatttgttataatatcaagtacagtcggctacataaggtcaccacatgtgtaaagttacaaaattctatggccttatatacctaccaagagcctgcttactctcaatgatagggacttagggtgatagaagtgcaaagcatgactgtcaaatttttggagcaggttttctgacttcggtcggaaaacccctttcccttcttgtaatacaaaataataacaaccacagaggacatcgcaagtaaaatgtgtataacaaccccatctaaagaaccctatcatctttctactatctgtctacctaaatatgtatagtataaataaccctatatagcactctaagcaacttaagttaggtaacttagaaaactcttttttttttttgagactgagtctcactctgtcgcacccaggctggagtgcagtggcgtgatctcggctcactgcaacctccaccttctgggttcaagtgattctcccatctcagtctcccaagtagctgggattacaggcacgccaccatgccctgctacatttttttttttttagtagagatgaggtttcaccacattggccaggctgttctcgaactcctgacctcaggtgatccgcccaccttggcctcatgaagtgctgggattacaggtgtgagccactgtacccagccagaaaactcttaaaaaac

SEQ ID NO: 900 - DNA, 969 bp, synthetic construct
  source 1..969: mol_type = other DNA
cgcttcggtgtgtcacttcggccacagagggagacagacgattacggcccacggaaggccgcgtgagtctcgtgaagctggagatgcgctgggtctacctttcgccgtccgctccgccttggcagaggcgccgacacgcaccgaaggcagagaacccatctcgtatgggaccgcaccggacacgggcgcctgggccaggagcagagccgggccgtagaatagacatggccgtcgggggcggggcttcggaaggtttaaccaatccaaactgttgtattttgcatagccccaaagcattttggttaacagtaaaaacatcctaaatttaagtattttaatttaaacttagaacgaagcgagtataaaaaggattatttaaccctaaaacggattcaggatttgttataatatcaagtacagtcggctacataaggtcaccacatgtgtaaagttacaaaattctatggccttatatacctaccaagagcctgcttactctcaatgatagggacttagggtgatagaagtgcaaagcatgactgtcaaatttttggagcaggttttctgacttcggtcggaaaacccctctgaattttcttgcagttgaacaacagaggctttttttgtgtgtgtgggggtgcttggttttgggaggttgaagagtacttgttcgcaaactctctaaatgagagatggggaagtgtcttaccagctgattcgcgagagcacctgcaagtttacctgttttagtgatttgcgtttatgaaagttggagttgctgattttgtgatctctacttttaaggtaaaagcagggcggtgttgacttttcttgccagttggctgtcctgttttctttctcgcactgttttctttttgagacgaagtctgtcgctcaggctggagtgcactggcgtgatctcggctcgctgcaaactttgccgaacccctgtttagcgatttccgtttg

SEQ ID NO: 901 - DNA, 1087 bp, synthetic construct
  source 1..1087: mol_type = other DNA
cgcttcggtgtgtcacttcggccacagagggagacagacgattacggcccacggaaggccgcgtgagtctcgtgaagctggagatgcgctgggtctacctttcgccgtccgctccgccttggcagaggcgccgacacgcaccgaaggcagagaacccatctcgtatgggaccgcaccggacacgggcgcctgggccaggagcagagccgggccgtagaatagacatggccgtcgggggcggggcttcggaaggtttaaccaatccaaactgttgtattttgcatagccccaaagcattttggttaacagtaaaaacatcctaaatttaagtattttaatttaaacttagaacgaagcgagtataaaaaggattatttaaccctaaaacggattcaggatttgttataatatcaagtacagtcggctacataaggtcaccacatgtgtaaagttacaaaattctatggccttatatacctaccaagagcctgcttactctcaatgatagggacttagggtgatagaagtgcaaagcatgactgtcaaatttttggagcaggttttctgacttcggtcggaaaacccctatatgtggtaatccaacaatagaaattatttttaagtttgtgtgttcctttttctgttcaatggtgcttttgatattgttgtaaagcagtgactagcagattctgtgtggtaaaagcactgaaccctgtttagttcttttctccctaccttattggtaattatttctgtgtatatatgttccaaagaaatgcggcttgtatattcatgcttttcaactttttgtgatagacagttgatacacaagtagtacctcctccgggatcttcttagtcaagactgtttggtagatgcatgttttttgttacttgtaatgtacagtattcagttcattttctttttgcagcactgtccggttgaaacacaacgcgaggatcgggcgtggtggctcacgcctgtaatcccagcactttgggaggccgaggcaggacaatcaagaccaatcctggtcatcaaggcaggagaatcaagaccatcgaggtcaggagatcaagaccatcct

SEQ ID NO: 902 - DNA, 1085 bp, synthetic construct
  source 1..1085: mol_type = other DNA
cgcttcggtgtgtcacttcggccacagagggagacagacgattacggcccacggaaggccgcgtgagtctcgtgaagctggagatgcgctgggtctacctttcgccgtccgctccgccttggcagaggcgccgacacgcaccgaaggcagagaacccatctcgtatgggaccgcaccggacacgggcgcctgggccaggagcagagccgggccgtagaatagacatggccgtcgggggcggggcttcggaaggtttaaccaatccaaactgttgtattttgcatagccccaaagcattttggttaacagtaaaaacatcctaaatttaagtattttaatttaaacttagaacgaagcgagtataaaaaggattatttaaccctaaaacggattcaggatttgttataatatcaagtacagtcggctacataaggtcaccacatgtgtaaagttacaaaattctatggccttatatacctaccaagagcctgcttactctcaatgatagggacttagggtgatagaagtgcaaagcatgactgtcaaatttttggagcaggttttctgacttcggtcggaaaacccctacatcaggttgtttttctgtttttacatcaggttgtttttctgtttggttttttttttacaccacgtttatacgccggtgcacggtttaccactgaaaacacctttcatctacaggtgatatcttttaacacaaataaaatgtagtagtcctaggagacggaatagaaggaggtggggcctaggcagattcatctctgcggtgcattttgcctctggccctcgggccctagtttgcgatctttcccatcttgcctctgcttccctctgcacaatcctgagtattgcagtaccttacacttaaggaaatttcgtcttgccaaagttgatccatttcagctccgaaacataacaggaactagtgcaacgataaacgtatgaggaacttgcaataagagtgacagaatcctttgaatcaaaaaaaaaaaaagccaccacttaatgagtatctaccatatgtcaagggcttcaccaatatttcattgaaatattccagacca

SEQ ID NO: 903 - DNA, 1087 bp, synthetic construct
  source 1..1087: mol_type = other DNA
cgcttcggtgtgtcacttcggccacagagggagacagacgattacggcccacggaaggccgcgtgagtctcgtgaagctggagatgcgctgggtctacctttcgccgtccgctccgccttggcagaggcgccgacacgcaccgaaggcagagaacccatctcgtatgggaccgcaccggacacgggcgcctgggccaggagcagagccgggccgtagaatagacatggccgtcgggggcggggcttcggaaggtttaaccaatccaaactgttgtattttgcatagccccaaagcattttggttaacagtaaaaacatcctaaatttaagtattttaatttaaacttagaacgaagcgagtataaaaaggattatttaaccctaaaacggattcaggatttgttataatatcaagtacagtcggctacataaggtcaccacatgtgtaaagttacaaaattctatggccttatatacctaccaagagcctgcttactctcaatgatagggacttagggtgatagaagtgcaaagcatgactgtcaaatttttggagcaggttttctgacttcggtcggaaaacccctcttatgatgtttgttgccaatgatagattgttttcactgtgcaaaaattatgggtagttttggtggtcttgatgcagttgtaagcttggggtatgaaggtttgggccacgcctgggcgcttccggctgcgccggatgctgtttcctttccgctcccaggggcgttgggaacggttgtaggacgtggctctttattcgtgagttttccatttacctccgctgaacctagagcttcagacgccctatggcgtccgcctcgacccaaccggcggccttgagcgctgagcaagcaaagggtgagaatcgtcctagtcaaggcataggctgctggcctggggtagtcaaggcatgggctgctggtctggggaggatgcgggcggaggatgtggggcgacaaacctggctacgtccgccgggaaaatggggtaggggacgccgggtaccgtccttctaagtggggcgcttgcccccaagacttgggatcttattgggttacctaca

SEQ ID NO: 904 - DNA, 1085 bp, synthetic construct
  source 1..1085: mol_type = other DNA
cgcttcggtgtgtcacttcggccacagagggagacagacgattacggcccacggaaggccgcgtgagtctcgtgaagctggagatgcgctgggtctacctttcgccgtccgctccgccttggcagaggcgccgacacgcaccgaaggcagagaacccatctcgtatgggaccgcaccggacacgggcgcctgggccaggagcagagccgggccgtagaatagacatggccgtcgggggcggggcttcggaaggtttaaccaatccaaactgttgtattttgcatagccccaaagcattttggttaacagtaaaaacatcctaaatttaagtattttaatttaaacttagaacgaagcgagtataaaaaggattatttaaccctaaaacggattcaggatttgttataatatcaagtacagtcggctacataaggtcaccacatgtgtaaagttacaaaattctatggccttatatacctaccaagagcctgcttactctcaatgatagggacttagggtgatagaagtgcaaagcatgactgtcaaatttttggagcaggttttctgacttcggtcggaaaaccccttctttactgttatatgttaggcgaaatattacgcgtttggagtaagtggtgctttttgtaactgaaaagagattctgtgtgtgtttttttttttttagaggctgcatagttatttgtatgaaccgcaggtgacctaattagcaaggtaattcagacctgtatcctagcacttaagaagtggaagtgggataaccctgcgtgttctcgtgtgggaggctagcttaagcaacaaagcaggaaggccccaccaacaaaagaatttaaaaattatacgtgcgtggtggcgcgcgtatgaggaaattatttggcaactgtgttacagtatagcagcaaatggaatagacctagtccctgactttaggagacctgcctcagccccccgaatggctgggactacaggcgtgcgcctccgcgcccagctaatttttgcatttttggtagagacgggttcaccatgttggccaggatggtctccatctcttcatctggtgatccgcc

SEQ ID NO: 905 - DNA, 1087 bp, synthetic construct
  source 1..1087: mol_type = other DNA
cgcttcggtgtgtcacttcggccacagagggagacagacgattacggcccacggaaggccgcgtgagtctcgtgaagctggagatgcgctgggtctacctttcgccgtccgctccgccttggcagaggcgccgacacgcaccgaaggcagagaacccatctcgtatgggaccgcaccggacacgggcgcctgggccaggagcagagccgggccgtagaatagacatggccgtcgggggcggggcttcggaaggtttaaccaatccaaactgttgtattttgcatagccccaaagcattttggttaacagtaaaaacatcctaaatttaagtattttaatttaaacttagaacgaagcgagtataaaaaggattatttaaccctaaaacggattcaggatttgttataatatcaagtacagtcggctacataaggtcaccacatgtgtaaagttacaaaattctatggccttatatacctaccaagagcctgcttactctcaatgatagggacttagggtgatagaagtgcaaagcatgactgtcaaatttttggagcaggttttctgacttcggtcggaaaacccctaccttattcacgcctaaaaagtagactgactgtggggtggtcgtgttttttgtttcttgttggtaggtggtgaatgcgtttttttcgttgttttctccgttactcaggctgccagttgcttggcagtcttgtcgctggctgtggacgctctgcacttcatcaccgtccccagctgcgctttgagccggtctaaggttgcccacagtattgacgttgggacccacgaaactggcaatttccatgtgtgcggccttacccagttctcccaaacttctgcgtataaccgcttctctgtgcttcagaaagataagtccggccccggcctcacacagcagctcagttcgtgacagcgtttaatatgtaaaatggagcaaataatttatagggcgttgggagagttaaagagactaattcatttacgtgttaaatacagggaatggcttttgcattgatataaccccagcctccagcatgcgccagacctgacgtaggtgttcggc

SEQ ID NO: 906 - DNA, 1087 bp, synthetic construct
  source 1..1087: mol_type = other DNA
cgcttcggtgtgtcacttcggccacagagggagacagacgattacggcccacggaaggccgcgtgagtctcgtgaagctggagatgcgctgggtctacctttcgccgtccgctccgccttggcagaggcgccgacacgcaccgaaggcagagaacccatctcgtatgggaccgcaccggacacgggcgcctgggccaggagcagagccgggccgtagaatagacatggccgtcgggggcggggcttcggaaggtttaaccaatccaaactgttgtattttgcatagccccaaagcattttggttaacagtaaaaacatcctaaatttaagtattttaatttaaacttagaacgaagcgagtataaaaaggattatttaaccctaaaacggattcaggatttgttataatatcaagtacagtcggctacataaggtcaccacatgtgtaaagttacaaaattctatggccttatatacctaccaagagcctgcttactctcaatgatagggacttagggtgatagaagtgcaaagcatgactgtcaaatttttggagcaggttttctgacttcggtcggaaaaccccttttgacccattacccatctaagttagatgcttttttaaatgttttttaatttttaaatttttaatttttttcattatttattttttatttttgagacggatctcggctcactgtaacctccacctcccgggttcaagcgattctcctgactcagcctcccgagtagctgggattacaggcgcgcgccaccatgcccggctaatttttctatttttagtaaagacggggtttcgccatgttgaccagggtggtcttgaactcctgacgtcaggtgatcctcctgcctcgtgctgggattgcaggcgtgagccaccgctcccggcccttagatgctttttaatcagcaagtacgcaatgctttcctgacaggaatgtcaagtccgtcaggaaatccacataagggtgttaagcaggcaaagtaccacatacagattaaaatcaaaagcactgtcaacgcttatttaatttatacagtagaccctaacttttctaattttgtg

SEQ ID NO: 907 - DNA, 1087 bp, synthetic construct
  source 1..1087: mol_type = other DNA
cgcttcggtgtgtcacttcggccacagagggagacagacgattacggcccacggaaggccgcgtgagtctcgtgaagctggagatgcgctgggtctacctttcgccgtccgctccgccttggcagaggcgccgacacgcaccgaaggcagagaacccatctcgtatgggaccgcaccggacacgggcgcctgggccaggagcagagccgggccgtagaatagacatggccgtcgggggcggggcttcggaaggtttaaccaatccaaactgttgtattttgcatagccccaaagcattttggttaacagtaaaaacatcctaaatttaagtattttaatttaaacttagaacgaagcgagtataaaaaggattatttaaccctaaaacggattcaggatttgttataatatcaagtacagtcggctacataaggtcaccacatgtgtaaagttacaaaattctatggccttatatacctaccaagagcctgcttactctcaatgatagggacttagggtgatagaagtgcaaagcatgactgtcaaatttttggagcaggttttctgacttcggtcggaaaacccctgtttacttggttttaaaaatagcttgcactagcgataccgcgaatatggttattaggtttgttaggcacagtcgtgtcttactatagaaaaataacgtagtgttcattttgctgcctgtatgtgttaatttgtccttattgcgccattgttcttgttaagtcttctgtaaggagttgcgggtttcaaactgtcagtctgagagcataagctcacttttcagtcagttgaattgaatgttacattcgattggttctggatattgatattacccaaggcttgtcctgtttgtaagtcttttcctacacctgacaatatgattatgtttacaatgtccctagaactctgggtgtatcgttcccactgaataaaatttgatctctaagttgacctataaatttaagtaccaaaaaactggtttgtaagattttggaaggcagaggcagggaagagaccaacgtggtctacatataaagtaccaggtacatataaagtaccaggt

SEQ ID NO: 908 - DNA, 1083 bp, synthetic construct
  source 1..1083: mol_type = other DNA
cgcttcggtgtgtcacttcggccacagagggagacagacgattacggcccacggaaggccgcgtgagtctcgtgaagctggagatgcgctgggtctacctttcgccgtccgctccgccttggcagaggcgccgacacgcaccgaaggcagagaacccatctcgtatgggaccgcaccggacacgggcgcctgggccaggagcagagccgggccgtagaatagacatggccgtcgggggcggggcttcggaaggtttaaccaatccaaactgttgtattttgcatagccccaaagcattttggttaacagtaaaaacatcctaaatttaagtattttaatttaaacttagaacgaagcgagtataaaaaggattatttaaccctaaaacggattcaggatttgttataatatcaagtacagtcggctacataaggtcaccacatgtgtaaagttacaaaattctatggccttatatacctaccaagagcctgcttactctcaatgatagggacttagggtgatagaagtgcaaagcatgactgtcaaatttttggagcaggttttctgacttcggtcggaaaacccctatttttgtggtgctaaaagttagattgcattccgcccttctcacgtctctttacgtgttgtttgcgaggcgtggcctcggaggtaaatggtctccttttacctcagataagcttacctttgctctgtgagtaagaatgtagctacacttccaaatttagctattgtcctttgcggtccaaatgaaaatattaccttccgatctaacaatgttaaactagtcccaggcccttctatcgattgccagaatagactagactactacacagacacaccctctcaaatcaggccagctcctgcaacctgcacctacagtttgtcccctgggacaaatgaaaggacaggccctctttcccccccccccccaaatcagagcacacacagatcttggggtctggggcagaaatttcgttcatggaaaaaacaaacaaacaaacaaacacgatcaaaggaagctcgttccctttggcctcagggtttcttagacgccgtgttccc

SEQ ID NO: 909 - DNA, 1084 bp, synthetic construct
  source 1..1084: mol_type = other DNA
cgcttcggtgtgtcacttcggccacagagggagacagacgattacggcccacggaaggccgcgtgagtctcgtgaagctggagatgcgctgggtctacctttcgccgtccgctccgccttggcagaggcgccgacacgcaccgaaggcagagaacccatctcgtatgggaccgcaccggacacgggcgcctgggccaggagcagagccgggccgtagaatagacatggccgtcgggggcggggcttcggaaggtttaaccaatccaaactgttgtattttgcatagccccaaagcattttggttaacagtaaaaacatcctaaatttaagtattttaatttaaacttagaacgaagcgagtataaaaaggattatttaaccctaaaacggattcaggatttgttataatatcaagtacagtcggctacataaggtcaccacatgtgtaaagttacaaaattctatggccttatatacctaccaagagcctgcttactctcaatgatagggacttagggtgatagaagtgcaaagcatgactgtcaaatttttggagcaggttttctgacttcggtcggaaaacccctataactggtaaccaaaagcagattactttcccccttgtggtcttcgcgtttgcggacgggagagaactttcggccattttccttttagaaatttaacttcttgaaggccaccaggtgacccttacttccctctcacctttccttctacctgtactttctctattaaaaagcctgcagaagtacccttgacaaattgccaaaaatgacacctaaaaaaaaaaaaaggaaaaacgacaccttaggtaattataggttgtaagaaaaagatttgacctcttggagtttttatttcttaataccaaaggacacccaaggaacgtatctctcaaaattgggtttcaaacctcagccgtttccttcttagttccagtgcttaacacgcaacagacctgcacaccactacactgcatacgagttttaaagttaataaatcagtcacccctccatagtcttctacctacttgaagacagaaacggctgctaggaagcaattcttc

SEQ ID NO: 910 - DNA, 1087 bp, synthetic construct
  source 1..1087: mol_type = other DNA
cgcttcggtgtgtcacttcggccacagagggagacagacgattacggcccacggaaggccgcgtgagtctcgtgaagctggagatgcgctgggtctacctttcgccgtccgctccgccttggcagaggcgccgacacgcaccgaaggcagagaacccatctcgtatgggaccgcaccggacacgggcgcctgggccaggagcagagccgggccgtagaatagacatggccgtcgggggcggggcttcggaaggtttaaccaatccaaactgttgtattttgcatagccccaaagcattttggttaacagtaaaaacatcctaaatttaagtattttaatttaaacttagaacgaagcgagtataaaaaggattatttaaccctaaaacggattcaggatttgttataatatcaagtacagtcggctacataaggtcaccacatgtgtaaagttacaaaattctatggccttatatacctaccaagagcctgcttactctcaatgatagggacttagggtgatagaagtgcaaagcatgactgtcaaatttttggagcaggttttctgacttcggtcggaaaacccctctggggaataagagtggtttaaagaaagaacaatttgagagatctgcttagatctaataaaacccaagtatagtttctttagacgtcttatatctcacgtaggacctcttatttcagactcactgcaagaacaagctaaagaactatatacagtcaggaacaaggtgagccatcgcggttctcagtcccatgatcttaagagtttttcctcttcccctcttccctggctgtcctggagctcactctgtagaccaggctggtctcaaactcagaaatccacttacctctgcctcccaagggctgggattaaaggcatgcaccaccattgcccggcagggtatgtggactatgctgtccttcaactcagagatcgtggtactttaaatctcattttccgaaagaaaagaaaagaaaggaaggggggaaataaagccagtatattttgcacccacaatctgaagttctacaaatattgttagaaaatgcaaaggacccaagtc

SEQ ID NO: 911 - DNA, 1087 bp, synthetic construct
  source 1..1087: mol_type = other DNA
cgcttcggtgtgtcacttcggccacagagggagacagacgattacggcccacggaaggccgcgtgagtctcgtgaagctggagatgcgctgggtctacctttcgccgtccgctccgccttggcagaggcgccgacacgcaccgaaggcagagaacccatctcgtatgggaccgcaccggacacgggcgcctgggccaggagcagagccgggccgtagaatagacatggccgtcgggggcggggcttcggaaggtttaaccaatccaaactgttgtattttgcatagccccaaagcattttggttaacagtaaaaacatcctaaatttaagtattttaatttaaacttagaacgaagcgagtataaaaaggattatttaaccctaaaacggattcaggatttgttataatatcaagtacagtcggctacataaggtcaccacatgtgtaaagttacaaaattctatggccttatatacctaccaagagcctgcttactctcaatgatagggacttagggtgatagaagtgcaaagcatgactgtcaaatttttggagcaggttttctgacttcggtcggaaaacccctctcggtttatcttaaagggttttaaatatagaaagcttccttagtcttatgggtgagagtgctgtttaagccttacctaggtatgtctttgaacatttattacagattgttatttgtgactatgaccactcaggtgttctgttcttgtgaatttagacacactcagaaaggctacacactcaaagaccacaccaaagtgaagtactatctgggccgtgaaactggtcacatatcagttattttgcagtaaaacaaggaagtcaatcatactgcttcagtgggtcagggagtcaagaatgcacagtacaagagctggtgagattcctcagcaggtaagagcactgaatgctcttccaaagattctgagttcaaatcccagcaaccacgtggtggatttgaacaaaggatgaaaacaaccatccataaccagatctgatgccctcttctggagtgtcaaaagacagctatggtgtacttacataaataaataagtaaaaaca

SEQ ID NO: 912 - DNA, 1087 bp, synthetic construct
  source 1..1087: mol_type = other DNA
cgcttcggtgtgtcacttcggccacagagggagacagacgattacggcccacggaaggccgcgtgagtctcgtgaagctggagatgcgctgggtctacctttcgccgtccgctccgccttggcagaggcgccgacacgcaccgaaggcagagaacccatctcgtatgggaccgcaccggacacgggcgcctgggccaggagcagagccgggccgtagaatagacatggccgtcgggggcggggcttcggaaggtttaaccaatccaaactgttgtattttgcatagccccaaagcattttggttaacagtaaaaacatcctaaatttaagtattttaatttaaacttagaacgaagcgagtataaaaaggattatttaaccctaaaacggattcaggatttgttataatatcaagtacagtcggctacataaggtcaccacatgtgtaaagttacaaaattctatggccttatatacctaccaagagcctgcttactctcaatgatagggacttagggtgatagaagtgcaaagcatgactgtcaaatttttggagcaggttttctgacttcggtcggaaaacccctccacattttgtgtttaaaaatagaaatatttaagtgagatcagtttaaatctgctttatctagggtgtctaactgcttgcatctttttaacttttccttatttgtgagaaggtctgtaaaacttattatatgttagtacactgtagctgtcttcagacactccagaagagggattcagatcaccttacagatggttttgagccaccatgtggttgctgggatttgaactcaggacctttagaaaagtagttgggtgctcttacccgctgagccatctcaccagccctttttttttcttttttccagttcgggtttctctgtgtgtagccctggctgtcctggaactcattctgtagaccgggctggcctcgaactcagaaatctgcctgcctctgcctcccaagtgctgggattaaaggaatgtgccttcattgcccggctctagggctttttgttgttgtttgtttgtttgtttgtttgtttgcttttgtggatggcct

SEQ ID NO: 913 - DNA, 1087 bp, synthetic construct
  source 1..1087: mol_type = other DNA
cgcttcggtgtgtcacttcggccacagagggagacagacgattacggcccacggaaggccgcgtgagtctcgtgaagctggagatgcgctgggtctacctttcgccgtccgctccgccttggcagaggcgccgacacgcaccgaaggcagagaacccatctcgtatgggaccgcaccggacacgggcgcctgggccaggagcagagccgggccgtagaatagacatggccgtcgggggcggggcttcggaaggtttaaccaatccaaactgttgtattttgcatagccccaaagcattttggttaacagtaaaaacatcctaaatttaagtattttaatttaaacttagaacgaagcgagtataaaaaggattatttaaccctaaaacggattcaggatttgttataatatcaagtacagtcggctacataaggtcaccacatgtgtaaagttacaaaattctatggccttatatacctaccaagagcctgcttactctcaatgatagggacttagggtgatagaagtgcaaagcatgactgtcaaatttttggagcaggttttctgacttcggtcggaaaacccctaaaaccagtaagggagaaaggtcaagtaacatataaaggaaggcctatcagaattacaccagacttttcaccagagactatgaaagccagaagagcctggacagatgttatacagacactaagagaacacaaatgccagcccaggctactatacctggccaaactctcaattaccatagatggagaaaccaaagtattccacgacaaaaacaaattcacacaatatctttccacgaatccagcccttcaaaggataatgacagaaaagaagcaatacaaggacggaaatcacgccctagaacaaccaagaaactaatcattcaacaaaccaaaaagaagacagccacaagaacagaatgccaactctaacaacaaaaataaaaggaagcaacaattacttttccttaatatctcttaatatcaatggactcaattccccaataaaaagacatagactaacagactggctacacaaacaggacccaacattctgctgctta

SEQ ID NO: 914 - DNA, 1087 bp, synthetic construct
  source 1..1087: mol_type = other DNA
cgcttcggtgtgtcacttcggccacagagggagacagacgattacggcccacggaaggccgcgtgagtctcgtgaagctggagatgcgctgggtctacctttcgccgtccgctccgccttggcagaggcgccgacacgcaccgaaggcagagaacccatctcgtatgggaccgcaccggacacgggcgcctgggccaggagcagagccgggccgtagaatagacatggccgtcgggggcggggcttcggaaggtttaaccaatccaaactgttgtattttgcatagccccaaagcattttggttaacagtaaaaacatcctaaatttaagtattttaatttaaacttagaacgaagcgagtataaaaaggattatttaaccctaaaacggattcaggatttgttataatatcaagtacagtcggctacataaggtcaccacatgtgtaaagttacaaaattctatggccttatatacctaccaagagcctgcttactctcaatgatagggacttagggtgatagaagtgcaaagcatgactgtcaaatttttggagcaggttttctgacttcggtcggaaaacccctcccaatttcactggtctacaatgaaagcaaaacagttctcttccccgctccccggtgtgtgagaggggctttgatccttctctggtttcctaggaaacgcgtatgtgctagagccacgctctgagacttccgcctcgtgcggtcccgcttcctttctgcctcctctggcctgcatccgtgggggaggtggctggctgcagggttctccggatctcttctgtgttcccactactcaagcaccgagtggcgttctatggcgtccgcctcggctcagcccgcggccctgagcgcggagcaggccaagggtgaggaaagagcctagtctgggtgtgggccgtcttctggggggagggcgcgatactattctttgcctctccaagtggggcccttgcccattagggcgaagggttgggaggacaagcttatcgggttgcttgcaggcctcggcccactaattccctgcctcttccctcctctgggctcgcccgccgtcctccgcg

SEQ ID NO: 915 - DNA, 1087 bp, synthetic construct
  source 1..1087: mol_type = other DNA
cgcttcggtgtgtcacttcggccacagagggagacagacgattacggcccacggaaggccgcgtgagtctcgtgaagctggagatgcgctgggtctacctttcgccgtccgctccgccttggcagaggcgccgacacgcaccgaaggcagagaacccatctcgtatgggaccgcaccggacacgggcgcctgggccaggagcagagccgggccgtagaatagacatggccgtcgggggcggggcttcggaaggtttaaccaatccaaactgttgtattttgcatagccccaaagcattttggttaacagtaaaaacatcctaaatttaagtattttaatttaaacttagaacgaagcgagtataaaaaggattatttaaccctaaaacggattcaggatttgttataatatcaagtacagtcggctacataaggtcaccacatgtgtaaagttacaaaattctatggccttatatacctaccaagagcctgcttactctcaatgatagggacttagggtgatagaagtgcaaagcatgactgtcaaatttttggagcaggttttctgacttcggtcggaaaacccctgaatttgttaaattacaggaggaagcttttttagttcattttacaaatactttcttgttaggtagataataccttctaaggttattatctggatcttctaagtctttttatcgctagcaagtctaagtttctggactttggaattagaagttaatgtcgtaggcgggcatggtggtccacgcctttaatcccagagtttgggaggcagacgcaggtggttttctgagttcgaggccatcctgctcttcaatgttagttccaggacagccagggttatacaaagaaaccctgtctcgagaaacaaaacaaacaaaaaaagagtagctgagtgctctgagttgtctctccagccccttagctatttattttcatttaaattatttttgttttattcgcttgtgtgcctgagtttgaatttcccgggattaacagttgaagactagggctggtgagatggctcagcggttaagattgccgactgctcttccaaaggtcctgag

SEQ ID NO: 916 - DNA, 1087 bp, synthetic construct
  source 1..1087: mol_type = other DNA
cgcttcggtgtgtcacttcggccacagagggagacagacgattacggcccacggaaggccgcgtgagtctcgtgaagctggagatgcgctgggtctacctttcgccgtccgctccgccttggcagaggcgccgacacgcaccgaaggcagagaacccatctcgtatgggaccgcaccggacacgggcgcctgggccaggagcagagccgggccgtagaatagacatggccgtcgggggcggggcttcggaaggtttaaccaatccaaactgttgtattttgcatagccccaaagcattttggttaacagtaaaaacatcctaaatttaagtattttaatttaaacttagaacgaagcgagtataaaaaggattatttaaccctaaaacggattcaggatttgttataatatcaagtacagtcggctacataaggtcaccacatgtgtaaagttacaaaattctatggccttatatacctaccaagagcctgcttactctcaatgatagggacttagggtgatagaagtgcaaagcatgactgtcaaatttttggagcaggttttctgacttcggtcggaaaacccctaccccctaattctacaagaatagaaagcttagcagctcctctgaatggttgctctcaggtgctagtggttgcaagtcgtatgttgatgcctgcctttgccctacctggtgtgtgagcgtgagcgcgccccacctctccagcctctctcttactgtttttcagacaagatgggactgttgttctcctactgctatgtacctcaatttcaattgatcatgcctggacataactgcccatgttgtaaggtcgtctacgttgtaaggtcgtgctcagtttctgatgcctagactagtcacctttccgtttgcctcctgactgtgtaaatgaggcaaatgaaggtggtctcttaactgacatgttagtgtttgacctatgggatagtttctcattgttgagacagaatttctagaagctggtccgctgagcggctaagagcacttgctgatattgcaaaggatctacctgggtttggttctcagcactcacatggaagttcacat

SEQ ID NO: 917 - DNA, 654 bp, synthetic construct
  source 1..654: mol_type = other DNA
cgcttcggtgtgtcacttcggccacagagggagacagacgattacggcccacggaaggccgcgtgagtctcgtgaagctggagatgcgctgggtctacctttcgccgtccgctccgccttggcagaggcgccgacacgcaccgaaggcagagaacccatctcgtatgggaccgcaccggacacgggcgcctgggccaggagcagagccgggccgtagaatagacatggccgtcgggggcggggcttcggaaggtttaaccaatccaaactgttgtattttgcatagccccaaagcattttggttaacagtaaaaacatcctaaatttaagtattttaatttaaacttagaacgaagcgagtataaaaaggattatttaaccctaaaacggattcaggatttgttataatatcaagtacagtcggctacataaggtcaccacatgtgtaaagttacaaaattctatggccttatatacctaccaagagcctgcttactctcaatgatagggacttagggtgatagaagtgcaaagcatgactgtcaaatttttggagcaggttttctgacttcggtcggaaaaccccttgtagttcctgcaatttaattttcgtttaaaactttattttattctttaacttaaaaaaaatatata

SEQ ID NO: 918 - skipped

SEQ ID NO: 919 - RNA, 87 nt, Homo sapiens
  source 1..87: mol_type = unassigned RNA
aatgatagggacttagggtgagaaatattcctctaacattctacaaatttttggagcaggttttctgacttcggtcggaaaacccct

SEQ ID NO: 920 - RNA, 113 nt, Homo sapiens
  source 1..113: mol_type = unassigned RNA
aatgatagggacttagggtgagataatggtcacaggcggaagggatcgaatcagagtcatgcggaggtgtaaatttttggagcaggttttctgacttcggtcggaaaacccct

SEQ ID NO: 921 - RNA, 93 nt, Homo sapiens
  source 1..93: mol_type = unassigned RNA
aatgatagggacttagggtgaacattactttgaacttaacactactagaagaatttttggagcaggttttctgacttcggtcggaaaacccct

SEQ ID NO: 922 - RNA, 87 nt, Homo sapiens
  source 1..87: mol_type = unassigned RNA
aatgatagggacttagggtgatagaagtgcaaagcatgactgtcaaatttttggagcaggttttctgacttcggtcggaaaacccct

SEQ ID NO: 923 - protein, 486 aa, Homo sapiens
MVAGMLGLREEKSEDQDLQGLKDKPLKFKKVKKDKKEEKEGKHEPVQPSAHHSAEPAEAGKAETSEGSGSAPAVPEASASPKQRRSIIRDRGPMYDDPTLPEGWTRKLKQRKSGRSAGKYDVYLINPQGKAFRSKVELIAYFEKVGDTSLDPNDFDFTVTGRGSPSRREQKPPKKPKSPKAPGTGRGRGRPKGSGTTRPKAATSEGVQVKRVLEKSPGKLLVKMPFQTSPGGKAEGGGATTSTQVMVIKRPGRKRKAEADPQAIPKKRGRKPGSVVAAAAAEAKKKAVKESSIRSVQETVLPIKKRKTRETVSIEVKEVVKPLLVSTLGEKSGKGLKTCKSPGRKSKESSPKGRSSSASSPPKKEHHHHHHHSESPKAPVPLLPPLPPPPPEPESSEDPTSPPEPQDLSSSVCKEEKMPRGGSLESDGCPKEPAKTQPAVATAATAAEKYKHRGEGERKDIVSSSMPRPNREEPVDSRTPVTERVS

SEQ ID NO: 924 - DNA, 77 bp, Mus musculus
  source 1..77: mol_type = genomic DNA
atggccgccgctgccgccaccgccgccgccgccgccgcgccgagcggaggaggaggaggaggcgaggaggagagact

SEQ ID NO: 925 - DNA, 351 bp, Mus musculus
  source 1..351: mol_type = genomic DNA
ggaggaaaagtcagaagaccaggatctccagggcctcagagacaagccactgaagtttaagaaggcgaagaaagacaagaaggaggacaaagaaggcaagcatgagccactacaaccttcagcccaccattctgcagagccagcagaggcaggcaaagcagaaacatcagaaagctcaggctctgccccagcagtgccagaagcctcggcttcccccaaacagcggcgctccattatccgtgaccggggacctatgtatgatgaccccaccttgcctgaaggttggacacgaaagcttaaacaaaggaagtctggccgatctgctggaaagtatgatgtatatttgatcaa

SEQ ID NO: 926 - DNA, 1078 bp, Mus musculus
  source 1..1078: mol_type = genomic DNA
tccccagggaaaagcttttcgctctaaagtagaattgattgcatactttgaaaaggtgggagacacctccttggaccctaatgattttgacttcacggtaactgggagagggagcccctccaggagagagcagaaaccacctaagaagcccaaatctcccaaagctccaggaactggcaggggtcggggacgccccaaagggagcggcactgggagaccaaaggcagcagcatcagaaggtgttcaggtgaaaagggtcctggagaagagccctgggaaacttgttgtcaagatgcctttccaagcatcgcctgggggtaagggtgagggaggtggggctaccacatctgcccaggtcatggtgatcaaacgccctggcagaaagcgaaaagctgaagctgacccccaggccattcctaagaaacggggtagaaagcctgggagtgtggtggcagctgctgcagctgaggccaaaaagaaagccgtgaaggagtcttccatacggtctgtgcatgagactgtgctccccatcaagaagcgcaagacccgggagacggtcagcatcgaggtcaaggaagtggtgaagcccctgctggtgtccacccttggtgagaaaagcgggaagggactgaagacctgcaagagccctgggcgtaaaagcaaggagagcagccccaaggggcgcagcagcagtgcctcctccccacctaagaaggagcaccatcatcaccaccatcactcagagtccacaaaggcccccatgccactgctcccatccccacccccacctgagcctgagagctctgaggaccccatcagcccccctgagcctcaggacttgagcagcagcatctgcaaagaagagaagatgccccgaggaggctcactggaaagcgatggctgccccaaggagccagctaagactcagcctatggtcgccaccactaccacagttgcagaaaagtacaaacaccgaggggagggagagcgcaaagacattgtttcatcttccatgccaaggccaaacagagaggagcctgtggacagccggacgcccgtgaccgagagagttagctga

SEQ ID NO: 927 - DNA, 62 bp, Homo sapiens
  source 1..62: mol_type = genomic DNA
atggccgccgccgccgccgccgcgccgagcggaggaggaggaggaggcgaggaggagagact

SEQ ID NO: 928 - DNA, 351 bp, Homo sapiens
  source 1..351: mol_type = genomic DNA
ggaagaaaagtcagaagaccaggacctccagggcctcaaggacaaacccctcaagtttaaaaaggtgaagaaagataagaaagaagagaaagagggcaagcatgagcccgtgcagccatcagcccaccactctgctgagcccgcagaggcaggcaaagcagagacatcagaagggtcaggctccgccccggctgtgccggaagcttctgcctcccccaaacagcggcgctccatcatccgtgaccggggacccatgtatgatgaccccaccctgcctgaaggctggacacggaagcttaagcaaaggaaatctggccgctctgctgggaagtatgatgtgtatttgatcaa

SEQ ID NO: 929 - DNA, 1084 bp, Homo sapiens
  source 1..1084: mol_type = genomic DNA
tccccagggaaaagcctttcgctctaaagtggagttgattgcgtacttcgaaaaggtaggcgacacatccctggaccctaatgattttgacttcacggtaactgggagagggagcccctcccggcgagagcagaaaccacctaagaagcccaaatctcccaaagctccaggaactggcagaggccggggacgccccaaagggagcggcaccacgagacccaaggcggccacgtcagagggtgtgcaggtgaaaagggtcctggagaaaagtcctgggaagctccttgtcaagatgccttttcaaacttcgccagggggcaaggctgaggggggtggggccaccacatccacccaggtcatggtgatcaaacgccccggcaggaagcgaaaagctgaggccgaccctcaggccattcccaagaaacggggccgaaagccggggagtgtggtggcagccgctgccgccgaggccaaaaagaaagccgtgaaggagtcttctatccgatctgtgcaggagaccgtactccccatcaagaagcgcaagacccgggagacggtcagcatcgaggtcaaggaagtggtgaagcccctgctggtgtccaccctcggtgagaagagcgggaaaggactgaagacctgtaagagccctgggcggaaaagcaaggagagcagccccaaggggcgcagcagcagcgcctcctcaccccccaagaaggagcaccaccaccatcaccaccactcagagtccccaaaggcccccgtgccactgctcccacccctgcccccacctccacctgagcccgagagctccgaggaccccaccagcccccctgagccccaggacttgagcagcagcgtctgcaaagaggagaagatgcccagaggaggctcactggagagcgacggctgccccaaggagccagctaagactcagcccgcggttgccaccgccgccacggccgcagaaaagtacaaacaccgaggggagggagagcgcaaagacattgtttcatcctccatgccaaggccaaacagagaggagcctgtggacagccggacgcccgtgaccgagagagttagctga
